(19) United States
(12) Patent Application Publication
(10) Pub. No.: US 2024/0067968 A1
(43) Pub. Date: Feb. 29, 2024

(54) COMPOSITIONS, SYSTEMS, AND METHODS FOR REGULATION OF HEPATITIS B VIRUS THROUGH TARGETED GENE REPRESSION

(71) Applicant: Tune Therapeutics, Inc., Seattle, WA (US)

(72) Inventors: Brian COSGROVE, Durham, NC (US); Kendra CONGDON, Durham, NC (US); Jason DEAN, Seattle, WA (US); Veronica GOUGH, Durham, NC (US); Joshua B. BLACK, Durham, NC (US); Britta JONES, Durham, NC (US)

(73) Assignee: Tune Therapeutics, Inc., Seattle, WA (US)

(21) Appl. No.: 18/452,508

(22) Filed: Aug. 18, 2023

Related U.S. Application Data
(60) Provisional application No. 63/531,309, filed on Aug. 7, 2023.
(60) Provisional application No. 63/472,236, filed on Jun. 9, 2023.
(60) Provisional application No. 63/399,634, filed on Aug. 19, 2022.

(51) Int. Cl. C12N 15/113; C12N 9/22; C12N 15/11; C12N 15/88

(52) U.S. Cl. CPC C12N 15/1131; C12N 9/22; C12N 15/11; C12N 15/88; C12N 2310/20; C12N 2310/315; C12N 2310/321; C12N 2310/351

(57) ABSTRACT

Provided herein are epigenetic-modifying DNA-targeting systems, such as CRISPR-Cas/guide RNA (gRNA) systems, for the transcriptional repression of Hepatitis B viral (HBV) genes to promote a cellular phenotype that leads to the reduction of HBV infection. In some embodiments, the epigenetic-modifying DNA-targeting systems bind to or target a target site of at least one gene or regulatory element thereof in a Hepatitis B viral DNA sequence in cell. In some aspects, the provided systems relate to the transcriptional repression of one or more Hepatitis B viral gene and/or regulatory element thereof. In some aspects, also provided herein are methods and uses related to the provided compositions, for example in repressing Hepatitis B viral replication and expression in connection with Hepatitis B infections.

### CROSS-REFERENCE TO RELATED APPLICATIONS

[0001] This application claims priority from U.S. provisional application No. 63/399,634 filed Aug. 19, 2022, entitled, “COMPOSITIONS, SYSTEMS, AND METHODS FOR REGULATION OF HEPATITIS B VIRUS THROUGH TARGETED GENE REPRESSION”, U.S. provisional application No. 63/472,236 filed Jun. 9, 2023, entitled, “COMPOSITIONS, SYSTEMS, AND METHODS FOR REGULATION OF HEPATITIS B VIRUS THROUGH TARGETED GENE REPRESSION”, and U.S. provisional application No. 63/531,309 filed Aug. 7, 2023, entitled, “COMPOSITIONS, SYSTEMS, AND METHODS FOR REGULATION OF HEPATITIS B VIRUS THROUGH TARGETED GENE REPRESSION”, the contents of which are incorporated by reference in their entireties.

### INCORPORATION BY REFERENCE OF SEQUENCE LISTING

[0002] The present application is being filed along with a Sequence Listing in electronic format. The Sequence Listing is provided as a file entitled 224742002000SeqList.xml, created Aug. 18, 2023, which is 1,595,298 bytes in size. The information in the electronic format of the Sequence Listing is incorporated by reference in its entirety.

### FIELD

[0003] The present disclosure relates in some aspects to epigenetic-modifying DNA-targeting systems, such as CRISPR-Cas/guide RNA (gRNA) systems, for the transcriptional repression of Hepatitis B viral (HBV) genes to promote a cellular phenotype that leads to the reduction of HBV infection. In some embodiments, the epigenetic-modifying DNA-targeting systems bind to or target a target site of at least one gene or regulatory element thereof in a Hepatitis B viral DNA sequence in cell. In some embodiments, the systems are multiplexed systems that bind to or target a target site in at least two genes or regulatory elements thereof. In some aspects, the systems of the present disclosure relate to the transcriptional repression of one or more Hepatitis B viral gene. In some aspects, the present disclosure is directed to methods and uses related to the provided compositions, for example in repressing Hepatitis B viral replication and expression in connection with treatments for Hepatitis B infections.

### BACKGROUND

[0004] A large patient population, estimated at one million individuals in the US alone, and 250 million worldwide, deals with chronic Hepatitis B infection. However, current standard of care, including suppression of viral DNA transcription such as administration of nucleoside analogs, PEGylated interferon, anti-sense oligonucleotide, and siRNA approaches face challenges in efficacy and stability. Therefore, there is a need for new and improved methods to overcome these challenges. The present disclosure addresses these and other needs.

### SUMMARY

[0005] Provided herein is an epigenetic-modifying DNA-targeting system comprising at least one DNA-targeting module for repressing transcription of one or more Hepatitis B viral (HBV) genes, wherein each of the at least one DNA-targeting module comprises a fusion protein comprising: (a) a DNA-binding domain for targeting to a target site in a Hepatitis B viral DNA sequence; and (b) at least one transcriptional repressor effector domain. In some embodiments, the at least one DNA-binding domain comprises a Clustered Regularly Interspaced Short Palindromic Repeats associated (Cas)-guide RNA (gRNA) combination comprising (a) a Cas protein or a variant thereof and (b) at least one gRNA; a zinc finger protein (ZFP); a transcription activator-like effector (TALE); a meganuclease; a homing endonuclease; or an I-SceI enzyme or a variant thereof, optionally wherein the DNA-binding domain comprises a catalytically inactive variant of any of the foregoing. In some embodiments, the Hepatitis B viral DNA sequence is an HBV gene or a regulatory element thereof. In some embodiments, the at least one DNA-targeting module comprises a plurality of DNA-targeting modules for targeting a plurality of target sites of one or a plurality of genes or regulatory elements thereof. In some embodiments, the plurality of DNA-targeting modules comprise at least a first DNA-targeting module and a second DNA-targeting module, wherein: (1) the first DNA-targeting module represses transcription of a first HBV gene, wherein the first DNA-targeting module comprises a first fusion protein comprising (a) a DNA-binding domain for targeting a target site of the first gene or regulatory DNA element thereof; and (b) at least one transcriptional repressor domain; and (2) the second DNA-targeting module represses transcription of a second HBV gene, wherein the second DNA-targeting module comprises a second fusion protein comprising (a) a DNA-binding domain for targeting a target site of the second gene or regulatory DNA element thereof; and (b) at least one transcriptional repressor domain, optionally wherein: the first DNA-targeting module and the second DNA-targeting module share the same fusion protein such that the first and second fusion protein are the same, and wherein the DNA-binding domain of the fusion protein is a Clustered Regularly Interspaced Short Palindromic Repeats associated (Cas) protein or variant thereof; and the first DNA-targeting module comprises a first guide RNA (gRNA) that targets a target site of a first HBV gene or regulatory element thereof, and the second DNA-targeting module comprises a second gRNA that targets a target site of a second HBV gene or regulatory element thereof.

[0006] Also provided herein is an epigenetic-modifying DNA-targeting system for repressing transcription of one or more Hepatitis B viral (HBV) genes, wherein the DNA-targeting system comprises: (a) a fusion protein comprising a Clustered Regularly Interspaced Short Palindromic Repeats associated (Cas) protein or variant thereof and at least one transcriptional repressor effector domain; and (b) a plurality of guide RNAs (gRNAs) comprising at least a first gRNA and a second gRNA, wherein the first gRNA targets a target site of a first HBV gene or regulatory element thereof, and the second gRNA targets a target site of a second HBV gene or regulatory element thereof, wherein the first and second genes or regulatory elements thereof regulate Hepatitis B virus replication and/or HBV transcription. In some embodiments, the DNA-targeting system further comprises a third gRNA that targets a target site of a third gene or regulatory element thereof that regulates Hepatitis B virus replication and/or HBV transcription. In some embodiments, the system further comprises a fourth gRNA that targets a target site of a fourth gene or regulatory element thereof, optionally a fifth gRNA that targets a fifth gene or regulatory element thereof, and/or optionally a sixth gRNA that targets a target site of a sixth gene or regulatory element thereof, wherein the genes or regulatory element thereof regulate Hepatitis B virus replication and/or HBV transcription. In some embodiments, the first, second, third, fourth, fifth, and/or sixth genes or regulatory elements thereof are different.

[0007] Also provided herein is an epigenetic-modifying DNA-targeting system for repressing transcription of one or more Hepatitis B viral (HBV) genes, wherein the DNA-targeting system comprises: (a) a fusion protein comprising a Clustered Regularly Interspaced Short Palindromic Repeats associated (Cas) protein or variant thereof and at least one transcriptional repressor effector domain; and (b) a plurality of guide RNAs (gRNAs) targeting a plurality of target sites of a plurality of genes or regulatory elements thereof, wherein the plurality of genes or regulatory elements thereof regulate Hepatitis B virus replication and/or HBV transcription.

[0008] Also provided herein is an epigenetic-modifying DNA-targeting system comprising a single DNA-targeting module for repressing transcription of more than one Hepatitis B viral (HBV) genes, wherein the DNA-targeting module comprises: (a) a fusion protein comprising a Clustered Regularly Interspaced Short Palindromic Repeats associated (Cas) protein or variant thereof and at least one transcriptional repressor effector domain; and (b) a guide RNAs (gRNA) targeting a plurality of target sites of a plurality of genes or regulatory elements thereof, wherein the plurality of genes or regulatory elements thereof regulate Hepatitis B virus replication and/or HBV transcription.

[0009] In any of the embodiments herein, repressing transcription results in reduced HBV replication and/or reduced HBV protein levels.

[0010] In any of the embodiments herein, the DNA-targeting system does not introduce a genetic disruption or a DNA break.

[0011] In any of the embodiments herein, the at least one DNA-binding module comprises a plurality of DNA-binding modules that together target a plurality of target sites in the HBV DNA sequence, optionally wherein each DNA-binding module targets a different target site in the HBV DNA sequence.

[0012] In any of the embodiments herein, the plurality of target sites are 2, 3, 4, 5, or 6 different target sites. In any of the embodiments herein, the plurality of target sites are each in a different HBV gene or a regulatory element thereof.

[0013] In any of the embodiments herein, each target site is in the same HBV gene or a regulatory element thereof.

[0014] In any of the embodiments herein, the system comprises 2 to 10 DNA-targeting modules.

[0015] In any of the embodiments herein, any two or more of the DNA-targeting modules share the same fusion protein or wherein any two or more of the DNA-targeting modules comprise different fusion proteins.

[0016] In any of the embodiments herein, the DNA-binding domain of each DNA-targeting module comprises a fusion protein comprising a Clustered Regularly Interspaced Short Palindromic Repeats associated (Cas) protein or variant thereof and at least one transcriptional repressor effector domain and wherein each DNA-targeting module comprises a unique gRNA.

[0017] In any of the embodiments herein, the target site, or each of the target sites, is present in a covalently closed circular DNA (cccDNA) form, relaxed circular DNA (rcDNA) form and/or is in HBV viral DNA integrated in the human genomic DNA. In any of the embodiments herein, the target site, or each of the target sites, is present at or near a gene or a regulatory element thereof involved in controlling HBV replication and/or HBV transcription.

[0018] In any of the embodiments herein, the gene involved in controlling HBV replication and/or HBV transcription encodes a polymerase, an envelope protein, capsid protein, transcription factor, or transcriptional transactivator. In any of the embodiments herein, the gene involved in controlling HBV replication and/or HBV transcription is a polymerase gene, S-family gene, X-gene, or core family gene.

[0019] In any of the embodiments herein, at least one target site is in gene or regulatory element thereof of the X-gene encoding Hepatitis B Virus Protein X (HBx).

[0020] In any of the embodiments herein, the target site, or each of the target sites, is at or near a regulatory element of the HBV gene involved in controlling HBV replication and/or HBV transcription. In some embodiments, the regulatory element is a promoter region. In some embodiments, the promoter region is a pre-S1 promoter, a pre-S2 promoter, X promoter, or basal core promoter. In some embodiments, the regulatory element is an enhancer region. In some embodiments, the enhancer region is an Enh1 or an Enh2 enhancer region. In some embodiments, the regulatory element is a transcript processing control region.

[0021] In any of the embodiments herein, the target site, or each of the target sites, is in a coding region of an HBV gene. In any of the embodiments herein, the target site, or each of the target sites, is located within 500 base pairs (bp), within 1000 bp, within 1500 bp of a transcription start site. In any of the embodiments herein, the target site, or each of the target sites, is positioned within a target region that is located at base pairs between 0-3300 base pairs (bp) of the HBV genome, optionally between 0-3182 bp corresponding to positions with reference to the HBV genome set forth in SEQ ID NO: 650. In any of the embodiments herein, the target site, or each of the target sites, is positioned within a target region that is located at base pairs between 43 bp-490 bp, 1033 bp-1749 bp, 1800 bp-1950 bp, or 2953 bp-3182 bp of the HBV genome corresponding to positions with reference to the HBV genome set forth in SEQ ID NO: 650. In any of the embodiments herein, the target site, or each of the target sites, is positioned within a target region that is located at base pairs between 1 bp-42 bp, 491 bp-1032 bp, 1750 bp-1799 bp, or 1951 bp-2952 bp of the HBV genome corresponding to positions with reference to the HBV genome set forth in SEQ ID NO: 650. In any of the embodiments herein, the target site, or each of the target sites, is in a CpG island of the HBV genome. In any of the embodiments herein, the target site, or each of the target sites, is positioned within a target region that is located at base pairs between 67 bp-392 bp, 1033 bp-1749 bp, or 2215 bp-2490 bp of the HBV genome corresponding to positions with reference to the HBV genome set forth in SEQ ID NO: 650. In any of the embodiments herein, the target site, or each of the target sites, is positioned within a target region that is located at base pairs between 1033 bp-1749 bp in a Hepatitis B viral sequence with reference to nucleotide positions of SEQ ID NO: 650. In any of the embodiments herein, the target site, or each of the target sites, is within a target region located within 300 base pairs upstream of the hepatitis B X protein (HBx) start codon.

[0022] Also provided herein is an epigenetic-modifying DNA-targeting system comprising at least one DNA-targeting module for repressing transcription of one or more Hepatitis B viral (HBV) genes, wherein each of the at least one DNA-targeting module comprises a fusion protein comprising: (a) a DNA-binding domain for targeting to a target site within a target region spanning within 300 base pairs upstream of the hepatitis B X protein (HBx) start codon; and (b) at least one transcriptional repressor effector domain.

[0023] In any of the embodiments herein, the target site, or each of the target sites, is positioned in the HBx basal core promoter region. In any of the embodiments herein, the target site, or each of the target sites, is positioned within the HBx promoter/Enhancer region.

[0024] In any of the embodiments herein, the target site, or each of the target sites, is within a target region spanning within 250 base pairs upstream of the hepatitis B X protein (HBx) start codon. In any of the embodiments herein, the target site, or each of the target sites, is within a target region having a sequence corresponding to the sequence located at base pairs between 1060-1480 bp of the HBV genome with reference to the HBV genome set forth in SEQ ID NO: 650. In any of the embodiments herein, the target site, or each of the target sites, is within a target region spanning within 150 base pairs upstream of the hepatitis B X protein (HBx) start codon. In any of the embodiments herein, the target site, or each of the target sites, is within a target region spanning within 120 base pairs upstream of the hepatitis B X protein (HBx) start codon. In any of the embodiments herein, the target site, or each of the target sites, is within a target region sequence corresponding to the sequence spanning 1250-1374 bp of the HBV genome with reference to the HBV genome set forth in SEQ ID NO: 650. In any of the embodiments herein, the target site, or each of the target sites, is within a target region sequence corresponding to the sequence spanning 1255-1302 bp of the HBV genome with reference to the HBV genome set forth in SEQ ID NO: 650. In any of the embodiments herein, the target site, or each of the target sites, is within a target region sequence corresponding to the sequence spanning 1260-1300 bp of the HBV genome with reference to the HBV genome set forth in SEQ ID NO: 650.

[0025] In any of the embodiments herein, the target site, or each of the target sites, is at least 70% homologous to all Hepatitis B viral genomes. In any of the embodiments herein, the target site, or each of the target sites, is at least 70% homologous to at least 1000 Hepatitis B viral genomes. In any of the embodiments herein, the target site, or each of the target sites, is at least 70% homologous to at least 1000 Hepatitis B viral genomes and comprises up to two mismatches.

[0026] In any of the embodiments herein, the target site, or each of the target sites, comprises the sequence set forth in any one of SEQ ID NOS: 1-195, a contiguous portion thereof of at least 14 nucleotides (nt), or a complementary sequence of any of the foregoing. In any of the embodiments herein, the target site, or each of the target sites comprises the sequence set forth in any one of SEQ ID NOs: 175, 138, 192, 152, 118, 125, 185, 63, 116, 124, 35, 82, a contiguous portion thereof of at least 14 nucleotides (nt), or a complementary sequence of any of the foregoing. In any of the embodiments herein, the target site, or each of the target sites comprises the sequence set forth in any one of SEQ ID NOs: 175, 138, 192, 152, 118, 125, 185, 63, 116, 124, 35, 82. In any of the embodiments herein, the target site, or each of the target sites comprises the sequence set forth in any one of SEQ ID NOs: 5, 6, 12, 18, 22, 26, 29, 38, 42, 43, 51, 56, 61, 63, 68, 72, 75, 79, 82, 84, 88, 89, 98, 99, 113, 116, 121, 124, 125, 118, 130, 133, 135, 138, 143, 150, 152, 155, 158, 164, 165, 175, 176, 182, 185, 189, 190, 192, a contiguous portion thereof of at least 14 nucleotides (nt), or a complementary sequence of any of the foregoing. In any of the embodiments herein, the target site, or each of the target sites comprises the sequence set forth in any one of SEQ ID NOs: 5, 6, 12, 18, 22, 26, 29, 38, 42, 43, 51, 56, 61, 63, 68, 72, 75, 79, 82, 84, 88, 89, 98, 99, 113, 116, 121, 124, 125, 118, 130, 133, 135, 138, 143, 150, 152, 155, 158, 164, 165, 175, 176, 182, 185, 189, 190, 192. In any of the embodiments herein, the target site, or each of the target sites, is set forth in any one of SEQ ID NOS: 12, 18, 20, 22, 26, 27, 46, 50, 63, 66, 73, 79, 185, 192, a contiguous portion thereof of at least 14 nucleotides, or a complementary sequence of any of the foregoing. In any of the embodiments herein, the target site, or each of the target sites, is set forth in any one of SEQ ID NOS: 12, 18, 20, 22, 26, 27, 46, 50, 63, 66, 73, 79, 185, 192. In any of the embodiments herein, the target site, or each of the target sites, comprises the sequence set forth in SEQ ID NO: 22, a contiguous portion thereof of at least 14 nucleotides, or a complementary sequence of any of the foregoing, optionally wherein the target site is set forth in SEQ ID NO: 22. In any of the embodiments herein, the target site, or each of the target sites, comprises the sequence set forth in SEQ ID NO: 63, a contiguous portion thereof of at least 14 nucleotides, or a complementary sequence of any of the foregoing, optionally wherein the target site is set forth in SEQ ID NO: 63.

[0027] In any of the embodiments herein, the gRNA, or each of the gRNA, comprises a gRNA spacer sequence comprising the sequence set forth in any one of SEQ ID NOs: 196-390. In any of the embodiments herein, the gRNA, or each of the gRNA further comprises the sequence set forth in SEQ ID NO: 587. In any of the embodiments herein, the gRNA, or each of the gRNA, comprises the sequence set forth in any one of SEQ ID NOS: 196-390. In any of the embodiments herein, the gRNA, or each of the gRNA, is set forth in any one of SEQ ID NOS: 391-585. In any of the embodiments herein, the gRNA, or each of the gRNA, comprises the sequence set forth in any one of SEQ ID NOS: 370, 333, 387, 347, 313, 320, 380, 256, 258, 311, 319, 230, 272, a contiguous portion thereof of at least 14 nucleotides, or a complementary sequence of any of the foregoing, optionally wherein the gRNA, or each of the gRNA, is set forth in any one of SEQ ID NOS: 565, 528, 542, 508, 515, 575, 515, 453, 506, 514, 425, or 472. In any of the embodiments herein, the gRNA, or each of the gRNA, comprises the sequence set forth in any one of SEQ ID NOS: 370, 333, 387, 347, 313, 320, 380, 256, 258, 311, 319, 230, 272, optionally wherein the gRNA, or each of the gRNA, is set forth in any one of SEQ ID NOS: 565, 528, 542, 508, 515, 575, 515, 453, 506, 514, 425, or 472. In any of the embodiments herein, the gRNA, or each of the gRNA, comprises the sequence set forth in any one of SEQ ID NOS: 200, 201, 207, 217, 221, 224, 233, 237, 238, 246, 251, 256, 258, 263, 267, 274, 270, 277, 279, 283, 284, 293, 294, 308, 311, 313, 316, 319, 320, 325, 328, 330, 333, 338, 345, 347, 350, 353, 359, 360, 370, 371, 377, 380, 384, 385, 387, a contiguous portion thereof of at least 14 nucleotides, or a complementary sequence of any of the foregoing, optionally wherein the gRNA, or each of the gRNA, is set forth in any one of SEQ ID NOS: 369, 395, 402, 408, 412, 416, 419, 428, 432, 433, 441, 446, 451, 453, 458, 462, 465, 469, 472, 474, 478, 479, 488, 489, 503, 506, 508, 511, 514, 515, 520, 523, 525, 575, 528, 533, 540, 542, 545, 548, 554, 555, 565, 566, 572, 579, 580, or 582. In any of the embodiments herein, the gRNA, or each of the gRNA, comprises the sequence set forth in any one of SEQ ID NOS: 200, 201, 207, 217, 221, 224, 233, 237, 238, 246, 251, 256, 258, 263, 267, 274, 270, 277, 279, 283, 284, 293, 294, 308, 311, 313, 316, 319, 320, 325, 328, 330, 333, 338, 345, 347, 350, 353, 359, 360, 370, 371, 377, 380, 384, 385, or 387, optionally wherein the gRNA, or each of the gRNA, is set forth in any one of SEQ ID NOS: 369, 395, 402, 408, 412, 416, 419, 428, 432, 433, 441, 446, 451, 453, 458, 462, 465, 469, 472, 474, 478, 479, 488, 489, 503, 506, 508, 511, 514, 515, 520, 523, 525, 575, 528, 533, 540, 542, 545, 548, 554, 555, 565, 566, 572, 579, 580, or 582. In any of the embodiments herein, the gRNA, or each of the gRNA, comprises the sequence set forth in any one of SEQ ID NOS: 207, 213, 215, 217, 221, 222, 241, 245, 258, 261, 268, 274, 380, 387, a contiguous portion thereof of at least 14 nucleotides, or a complementary sequence of any of the foregoing, optionally wherein the gRNA, or each of the gRNA, is set forth in any one of SEQ ID NOS: 402, 408, 410, 412, 416, 417, 436, 440, 453, 456, 463, 469, 575, 582. In any of the embodiments herein, the gRNA, or each of the gRNA, comprises the sequence set forth in any one of SEQ ID NOS: 207, 213, 215, 217, 221, 222, 241, 245, 258, 261, 268, 274, 380, 387. In any of the embodiments herein, the gRNA, or each of the gRNA, is set forth in any one of SEQ ID NOS: 402, 408, 410, 412, 416, 417, 436, 440, 453, 456, 463, 469, 575, 582. In any of the embodiments herein, the gRNA, or each of the gRNA, comprises the sequence set forth in SEQ ID NO: 217, a contiguous portion thereof of at least 14 nucleotides, or a complementary sequence of any of the foregoing. In any of the embodiments herein, the gRNA, or each of the gRNA, comprises the sequence set forth in SEQ ID NO: 217. In any of the embodiments herein, the gRNA, or each of the gRNA, is set forth in any one of SEQ ID NO: 412. In any of the embodiments herein, the gRNA, or each of the gRNA, comprises the sequence set forth in SEQ ID NO: 258, a contiguous portion thereof of at least 14 nucleotides, or a complementary sequence of any of the foregoing. In any of the embodiments herein, the gRNA, or each of the gRNA, comprises the sequence set forth in SEQ ID NO: 258. In any of the embodiments herein, the gRNA, or each of the gRNA, is set forth in any one of SEQ ID NO: 453.

[0028] In any of the embodiments herein, the target site, or each of the target sites, is at least 90% homologous to all Hepatitis B viral genomes. In any of the embodiments herein, the target site, or each of the target sites, is at least 90% homologous to at least 1000 Hepatitis B viral genomes. In any of the embodiments herein, the target site, or each of the target sites, is at least 90% homologous to at least 1000 Hepatitis B viral genomes and comprises up to two mismatches, optionally one or two mismatches.

[0029] In any of the embodiments herein, the target site, or each of the target sites, comprises a sequence set forth in any one of SEQ ID NOS: 35-100, a contiguous portion thereof of at least 14 nucleotides (nt), or a complementary sequence of any of the foregoing.

[0030] In any of the embodiments herein, the gRNA, or each of the gRNA, comprises a gRNA spacer sequence comprising the sequence set forth in any one of SEQ ID NOs: 230-295. In any of the embodiments herein, the gRNA, or each of the gRNA, further comprises the sequence set forth in SEQ ID NO: 587. In any of the embodiments herein, the gRNA, or each of the gRNA, comprises the sequence set forth in any one of SEQ ID NOs: 230-295, optionally wherein the gRNA or each of the gRNA is set forth in any one of SEQ ID NOs: 425-490.

[0031] In any of the embodiments herein, the up to two mismatches are located in the first 12 nt on the 5′ end of the protospacer.

[0032] In any of the embodiments herein, the target site, or each of the target sites, is at least 90% homology to at least 1000 Hepatitis B viral genomes and comprises zero mismatches.

[0033] In any of the embodiments herein, the target site comprises the sequence set forth in any one of SEQ ID NOS: 1-34, a contiguous portion thereof of at least 14 nucleotides (nt), or a complementary sequence of any of the foregoing. In any of the embodiments herein, the gRNA, or each of the gRNA, comprises a gRNA spacer sequence comprising the sequence set forth in SEQ ID NO: 196-229.

[0034] In any of the embodiments herein, the gRNA spacer sequence is between 14 nt and 24 nt, or between 16 nt and 22 nt in length. In any of the embodiments herein, the gRNA spacer sequence is 18 nt, 19 nt, 20 nt, 21 nt or 22 nt in length.

[0035] In any of the embodiments herein, the gRNA spacer sequence comprises modified nucleotides for increased stability.

[0036] In any of the embodiments herein, the at least one gRNA further comprises the sequence set forth in SEQ ID NO: 587. In any of the embodiments herein, the gRNA, or each of the gRNA, comprises the sequence set forth in any one of SEQ ID NOS: 196-229, optionally wherein the gRNA, or each of the gRNA, is set forth in any one of SEQ ID NOS: 391-424. In any of the embodiments herein, the gRNA, or each of the gRNA, comprises the sequence set forth in any one of SEQ ID NOS: 207, 213, 215, 217, 221, 222, 241, 245, 258, 261, 268, 274, 380, 387, optionally wherein the gRNA, or each of the gRNA, is set forth in any one of SEQ ID NOS: 402, 408, 410, 412, 416, 417, 436, 440, 453, 456, 463, 469, 575, 582. In any of the embodiments herein, the gRNA comprises the sequence set forth in SEQ ID NO: 217, optionally wherein the gRNA, is set forth in SEQ ID NO: 412.

[0037] In any of the embodiments herein, the Cas protein or a variant thereof is a Cas9 protein or a variant thereof. In any of the embodiments herein, the Cas protein or a variant thereof is a Cas12 protein or a variant thereof. In any of the embodiments herein, the Cas protein or a variant thereof is a variant Cas protein, wherein the variant Cas protein lacks nuclease activity or is a deactivated Cas (dCas) protein. In any of the embodiments herein, the variant Cas protein is a variant Cas9 protein that lacks nuclease activity or that is a deactivated Cas9 (dCas9) protein. In any of the embodiments herein, the Cas9 protein or a variant thereof is a Staphylococcus aureus Cas9 (SaCas9) protein or a variant thereof. In any of the embodiments herein, the variant Cas9 is a Staphylococcus aureus dCas9 protein (dSaCas9) that comprises at least one amino acid mutation selected from D10A and N580A, with reference to numbering of positions of SEQ ID NO: 596. In any of the embodiments herein, the variant Cas9 protein comprises the sequence set forth in SEQ ID NO: 597, or an amino acid sequence that has at least 90%, 91%, 92%, 93%, 94%, 95%, 96%, 97%, 98%, or 99% sequence identity to SEQ ID NO: 597. In any of the embodiments herein, the Cas9 protein or a variant thereof is a Streptococcus pyogenes Cas9 (SpCas9) protein or a variant thereof. In any of the embodiments herein, the variant Cas9 is a Streptococcus pyogenes dCas9 (dSpCas9) protein that comprises at least one amino acid mutation selected from D10A and H840A, with reference to numbering of positions of SEQ ID NO: 598. In any of the embodiments herein, the variant Cas9 protein comprises the sequence set forth in SEQ ID NO:599 or an amino acid sequence that has at least 90%, 91%, 92%, 93%, 94%, 95%, 96%, 97%, 98%, or 99% sequence identity thereto.

[0038] In any of the embodiments herein, the at least one DNA-binding domain comprises an engineered zinc finger protein (eZFP). In any of the embodiments herein, the at least one DNA-binding domain is an eZFP. In any of the embodiments herein, the target site comprises the nucleotide sequence set forth in any one of SEQ ID NOS: 1045, 1046, 1052, a contiguous portion thereof of at least 12 nt, or a complementary sequence of any of the foregoing. In any of the embodiments herein, the target site comprises the nucleotide sequence set forth in any one of SEQ ID NOS: 1045, 1046, 1052.

[0039] In any of the embodiments herein, the zinc finger protein comprises six zinc fingers denoted F1 through F6 in order from N-terminus to C-terminus, and wherein the amino acid sequence of each zinc finger recognition region is as follows: 1) F1:SEADRSR(SEQ ID NO:720) F2:DRSNLTR(SEQ ID NO:721) F3:QSSDLSR(SEQ ID NO:722) F4:YHWYLKK(SEQ ID NO:723) F5:RSDSLSV(SEQ ID NO:724) F6:QNANRKT(SEQ ID NO:725); 2) F1:RSDVLST(SEQ ID NO:726) F2:DNSSRTR(SEQ ID NO:727) F3:RPYTLRL(SEQ ID NO:728) F4:DSSHRTR(SEQ ID NO:729) F5:RSDHLSQ(SEQ ID NO:730) F6:DSSHRTR(SEQ ID NO:731); 3) F1:RSDHLSQ(SEQ ID NO:732) F2:QSADRTK(SEQ ID NO:733) F3:RSDHLSQ(SEQ ID NO:734) F4:RRSDLKR(SEQ ID NO:735) F5:RSDHLSR(SEQ ID NO:736) F6:QSSDLRR(SEQ ID NO:737); 4) F1:RSDNLSE(SEQ ID NO:738) F2:TSSNRKT(SEQ ID NO:739) F3:DRSHLTR(SEQ ID NO:740) F4:RSDALTQ(SEQ ID NO:741) F5:DRSALAR(SEQ ID NO:742) F6:RRFTLSK(SEQ ID NO:743); 5) F1:RSDHLSE(SEQ ID NO:744) F2:QYSGRYY(SEQ ID NO:745) F3:HGQTLNE(SEQ ID NO:746) F4:QSGNLAR(SEQ ID NO:747) F5:RSDSLLR(SEQ ID NO:748) F6:CREYRGK(SEQ ID NO:749); 6) F1:QSANRTT(SEQ ID NO:750) F2:RSANLTR(SEQ ID NO:751) F3:RSDVLSE(SEQ ID NO:752) F4:TSGHLSR(SEQ ID NO:753) F5:QSSDLSR(SEQ ID NO:754), F6:QWSTRKR(SEQ ID NO:755); 7) F1:QSGNLAR(SEQ ID NO:756) F2:ATCCLAH(SEQ ID NO:757) F3:RWQYLPT(SEQ ID NO:758) F4:DRSALAR(SEQ ID NO:759) F5:RSDNLSE(SEQ ID NO:760) F6:KRCNLRC(SEQ ID NO:761); 8) F1:NPANLTR(SEQ ID NO:762) F2:QNATRTK(SEQ ID NO:763) F3:QSGHLAR(SEQ ID NO:764) F4:NRHDRAK(SEQ ID NO:765) F5:RSDHLSE(SEQ ID NO:766), F6:QRRSRYK(SEQ ID NO:767); 9) F1:QSSDLSR(SEQ ID NO:768) F2:HRSTRNR(SEQ ID NO:769) F3:RSDVLSA(SEQ ID NO:770) F4:DSRTRKN(SEQ ID NO:771) F5:QSGSLTR(SEQ ID NO:772) F6:DQSGLAH(SEQ ID NO:773); 10) F1:QNPAQWR(SEQ ID NO:774) F2:RSADLSR(SEQ ID NO:775) F3:TSGSLSR(SEQ ID NO:776) F4:RSDHLSR(SEQ ID NO:777) F5:RSDSLLR(SEQ ID NO:778) F6:QSYDRFQ(SEQ ID NO:779); 11) F1:TSGSLSR(SEQ ID NO:780) F2:RSDHLSR(SEQ ID NO:781) F3:RSDSLLR(SEQ ID NO:782) F4:QSYDRFQ(SEQ ID NO:783) F5:RSDNLST(SEQ ID NO:784) F6:DNRDRIK(SEQ ID NO:785); 12) F1:DRSNLSR(SEQ ID NO:786) F2:LRQNLIM(SEQ ID NO:787) F3:ERGTLAR(SEQ ID NO:788) F4:RSDALTQ(SEQ ID NO:789) F5:RSDSLSQ(SEQ ID NO:790) F6:RKADRTR(SEQ ID NO:791); 13) F1:QYCCLTN(SEQ ID NO:792) F2:TSGNLTR(SEQ ID NO:793) F3:QSSDLSR(SEQ ID NO:794) F4:FRYYLKR(SEQ ID NO:795) F5:QSGDLTR(SEQ ID NO:796) F6:DKGNLTK(SEQ ID NO:797); 14) F1:TSGSLSR(SEQ ID NO:798) F2:RSDNLTT(SEQ ID NO:799) F3:QSGNLAR(SEQ ID NO:800) F4:DRTTLMR(SEQ ID NO:801) F5:QSGHLAR(SEQ ID NO:802) F6:QLTHLNS(SEQ ID NO:803); 15) F1:IKHDLHR(SEQ ID NO:804) F2:RSANLTR(SEQ ID NO:805) F3:RSDNLAR(SEQ ID NO:806) F4:QNVSRPR(SEQ ID NO:807) F5:RSDDLSK(SEQ ID NO:808) F6:DSSHRTR(SEQ ID NO:809); 16) F1:RSDNLAR(SEQ ID NO:810) F2:QNVSRPR(SEQ ID NO:811) F3:RSDDLSK(SEQ ID NO:812) F4:DSSHRTR(SEQ ID NO:813) F5:TSSNRKT(SEQ ID NO:814) F6:AQWTRAC(SEQ ID NO:815); 17) F1:RSDDLSK(SEQ ID NO:816) F2:DSSHRTR(SEQ ID NO:817) F3:TSSNRKT(SEQ ID NO:818) F4:AQWTRAC(SEQ ID NO:819) F5:RKQTRTT(SEQ ID NO:820) F6:HRSSLRR(SEQ ID NO:821); 18) F1:QSAHRKN(SEQ ID NO:822) F2:TSSNRKT(SEQ ID NO:823) F3:RSDNLSA(SEQ ID NO:824) F4:RNNDRKT(SEQ ID NO:825) F5:TSGSLSR(SEQ ID NO:826) F6:QAGHLAK(SEQ ID NO:827); 19) F1:RSDHLSQ(SEQ ID NO:828) F2:ASSTRTK(SEQ ID NO:829) F3:RSDDLTR(SEQ ID NO:830) F4:QKSNLSS(SEQ ID NO:831) F5:QSANRTT(SEQ ID NO:832) F6:QNATRTK(SEQ ID NO:833); 20) F1:RSDTLSE(SEQ ID NO:834) F2:RRWTLVG(SEQ ID NO:835) F3:DRSNLSR(SEQ ID NO:836) F4:QSGDLTR(SEQ ID NO:837) F5:QSSDLSR(SEQ ID NO:838) F6:YHWYLKK(SEQ ID NO:839); 21) F1:RSANLAR(SEQ ID NO:840) F2:RSDNLRE(SEQ ID NO:841) F3:RPYTLRL(SEQ ID NO:842) F4:HRSNLNK(SEQ ID NO:843) F5:QSGSLTR(SEQ ID NO:844) F6:TSANLSR(SEQ ID NO:845); 22) F1:RSDDLVR(SEQ ID NO:846) F2:TSGSLVR(SEQ ID NO:847) F3:RSDKLVR(SEQ ID NO:848) F4:RSDELVR(SEQ ID NO:849) F5:TSHSLTE(SEQ ID NO:850) F6:RADNLTE(SEQ ID NO:851); 23) F1:ERSHLRE(SEQ ID NO:852) F2:TSHSLTE(SEQ ID NO:853) F3:QAGHLAS(SEQ ID NO:854) F4:TSHSLTE(SEQ ID NO:855) F5:DPGHLVR(SEQ ID NO:856) F6:TSGNLVR(SEQ ID NO:857); 24) F1:RADNLTE(SEQ ID NO:858) F2:TSGSLVR(SEQ ID NO:859) F3:RKDNLKN(SEQ ID NO:860) F4:QSSSLVR(SEQ ID NO:861) F5:RSDKLVR(SEQ ID NO:862) F6:DSGNLRV(SEQ ID NO:863); 25) F1:QSSSLVR(SEQ ID NO:864) F2:QSGDLRR(SEQ ID NO:865) F3:RSDERKR(SEQ ID NO:866) F4:HRTTLTN(SEQ ID NO:867) F5:RSDHLTN(SEQ ID NO:868) F6:TSGELVR(SEQ ID NO:869); 26) F1:QSGDLRR(SEQ ID NO:870) F2:RSDERKR(SEQ ID NO:871) F3:HRTTLTN(SEQ ID NO:872) F4:RSDHLTN(SEQ ID NO:873) F5:TSGELVR(SEQ ID NO:874) F6:RSDDLVR(SEQ ID NO:875); 27) F1:QRAHLER(SEQ ID NO:876) F2:QLAHLRA(SEQ ID NO:877) F3:DPGHLVR(SEQ ID NO:878) F4:RRSACRR(SEQ ID NO:879) F5:RSDHLTT(SEQ ID NO:880) F6:QSSSLVR(SEQ ID NO:881); and 28) F1:QSSNLVR(SEQ ID NO:882) F2:RSDDLVR(SEQ ID NO:883) F3:THLDLIR(SEQ ID NO:884) F4:TSGNLTE(SEQ ID NO:885) F5:RRSACRR(SEQ ID NO:886) F6:RNDTLTE(SEQ ID NO:887).

[0040] In any of the embodiments herein, the zinc finger protein comprises six zinc fingers denoted F1 through F6 in order from N-terminus to C-terminus, and wherein the amino acid sequence of each zinc finger recognition region is as follows: F1:QSAHRKN(SEQ ID NO:822) F2:TSSNRKT(SEQ ID NO:823) F3:RSDNLSA(SEQ ID NO:824) F4:RNNDRKT(SEQ ID NO:825) F5:TSGSLSR(SEQ ID NO:826) F6:QAGHLAK(SEQ ID NO:827).

[0041] In any of the embodiments herein, the zinc finger protein comprises six zinc fingers denoted F1 through F6 in order from N-terminus to C-terminus, and wherein the amino acid sequence of each zinc finger recognition region is as follows: F1:RSDHLSQ(SEQ ID NO:828) F2:ASSTRTK(SEQ ID NO:829) F3:RSDDLTR(SEQ ID NO:830) F4:QKSNLSS(SEQ ID NO:831) F5:QSANRTT(SEQ ID NO:832) F6:QNATRTK(SEQ ID NO:833).

[0042] In any of the embodiments herein, the zinc finger protein comprises six zinc fingers denoted F1 through F6 in order from N-terminus to C-terminus, and wherein the amino acid sequence of each zinc finger recognition region is as follows: F1:QSSSLVR(SEQ ID NO:864) F2:QSGDLRR(SEQ ID NO:865) F3:RSDERKR(SEQ ID NO:866) F4:HRTTLTN(SEQ ID NO:867) F5:RSDHLTN(SEQ ID NO:868) F6:TSGELVR(SEQ ID NO:869).

[0043] Also provided herein is an epigenetic-modifying DNA-targeting system comprising: a) an eZFP that binds to a target site in one or more HBV genes or regulatory elements thereof and b) at least one effector domain that represses transcription of one or more HBV genes, wherein the zinc finger protein comprises six zinc fingers denoted F1 through F6 in order from N-terminus to C-terminus, and wherein the amino acid sequence of each zinc finger recognition region is as follows: 1) F1:SEADRSR(SEQ ID NO:720) F2:DRSNLTR(SEQ ID NO:721) F3:QSSDLSR(SEQ ID NO:722) F4:YHWYLKK(SEQ ID NO:723) F5:RSDSLSV(SEQ ID NO:724) F6:QNANRKT(SEQ ID NO:725); 2) F1:RSDVLST(SEQ ID NO:726) F2:DNSSRTR(SEQ ID NO:727) F3:RPYTLRL(SEQ ID NO:728) F4:DSSHRTR(SEQ ID NO:729) F5:RSDHLSQ(SEQ ID NO:730) F6:DSSHRTR(SEQ ID NO:731); 3) F1:RSDHLSQ(SEQ ID NO:732) F2:QSADRTK(SEQ ID NO:733) F3:RSDHLSQ(SEQ ID NO:734) F4:RRSDLKR(SEQ ID NO:735) F5:RSDHLSR(SEQ ID NO:736) F6:QSSDLRR(SEQ ID NO:737); 4) F1:RSDNLSE(SEQ ID NO:738) F2:TSSNRKT(SEQ ID NO:739) F3:DRSHLTR(SEQ ID NO:740) F4:RSDALTQ(SEQ ID NO:741) F5:DRSALAR(SEQ ID NO:742) F6:RRFTLSK(SEQ ID NO:743); 5) F1:RSDHLSE(SEQ ID NO:744) F2:QYSGRYY(SEQ ID NO:745) F3:HGQTLNE(SEQ ID NO:746) F4:QSGNLAR(SEQ ID NO:747) F5:RSDSLLR(SEQ ID NO:748) F6:CREYRGK(SEQ ID NO:749); 6) F1:QSANRTT(SEQ ID NO:750) F2:RSANLTR(SEQ ID NO:751) F3:RSDVLSE(SEQ ID NO:752) F4:TSGHLSR(SEQ ID NO:753) F5:QSSDLSR(SEQ ID NO:754), F6:QWSTRKR(SEQ ID NO:755); 7) F1:QSGNLAR(SEQ ID NO:756) F2:ATCCLAH(SEQ ID NO:757) F3:RWQYLPT(SEQ ID NO:758) F4:DRSALAR(SEQ ID NO:759) F5:RSDNLSE(SEQ ID NO:760) F6:KRCNLRC(SEQ ID NO:761); 8) F1:NPANLTR(SEQ ID NO:762) F2:QNATRTK(SEQ ID NO:763) F3:QSGHLAR(SEQ ID NO:764) F4:NRHDRAK(SEQ ID NO:765) F5:RSDHLSE(SEQ ID NO:766), F6:QRRSRYK(SEQ ID NO:767); 9) F1:QSSDLSR(SEQ ID NO:768) F2:HRSTRNR(SEQ ID NO:769) F3:RSDVLSA(SEQ ID NO:770) F4:DSRTRKN(SEQ ID NO:771) F5:QSGSLTR(SEQ ID NO:772) F6:DQSGLAH(SEQ ID NO:773); 10) F1:QNPAQWR(SEQ ID NO:774) F2:RSADLSR(SEQ ID NO:775) F3:TSGSLSR(SEQ ID NO:776) F4:RSDHLSR(SEQ ID NO:777) F5:RSDSLLR(SEQ ID NO:778) F6:QSYDRFQ(SEQ ID NO:779); 11) F1:TSGSLSR(SEQ ID NO:780) F2:RSDHLSR(SEQ ID NO:781) F3:RSDSLLR(SEQ ID NO:782) F4:QSYDRFQ(SEQ ID NO:783) F5:RSDNLST(SEQ ID NO:784) F6:DNRDRIK(SEQ ID NO:785); 12) F1:DRSNLSR(SEQ ID NO:786) F2:LRQNLIM(SEQ ID NO:787) F3:ERGTLAR(SEQ ID NO:788) F4:RSDALTQ(SEQ ID NO:789) F5:RSDSLSQ(SEQ ID NO:790) F6:RKADRTR(SEQ ID NO:791); 13) F1:QYCCLTN(SEQ ID NO:792) F2:TSGNLTR(SEQ ID NO:793) F3:QSSDLSR(SEQ ID NO:794) F4:FRYYLKR(SEQ ID NO:795) F5:QSGDLTR(SEQ ID NO:796) F6:DKGNLTK(SEQ ID NO:797); 14) F1:TSGSLSR(SEQ ID NO:798) F2:RSDNLTT(SEQ ID NO:799) F3:QSGNLAR(SEQ ID NO:800) F4:DRTTLMR(SEQ ID NO:801) F5:QSGHLAR(SEQ ID NO:802) F6:QLTHLNS(SEQ ID NO:803); 15) F1:IKHDLHR(SEQ ID NO:804) F2:RSANLTR(SEQ ID NO:805) F3:RSDNLAR(SEQ ID NO:806) F4:QNVSRPR(SEQ ID NO:807) F5:RSDDLSK(SEQ ID NO:808) F6:DSSHRTR(SEQ ID NO:809); 16) F1:RSDNLAR(SEQ ID NO:810) F2:QNVSRPR(SEQ ID NO:811) F3:RSDDLSK(SEQ ID NO:812) F4:DSSHRTR(SEQ ID NO:813) F5:TSSNRKT(SEQ ID NO:814) F6:AQWTRAC(SEQ ID NO:815); 17) F1:RSDDLSK(SEQ ID NO:816) F2:DSSHRTR(SEQ ID NO:817) F3:TSSNRKT(SEQ ID NO:818) F4:AQWTRAC(SEQ ID NO:819) F5:RKQTRTT(SEQ ID NO:820) F6:HRSSLRR(SEQ ID NO:821); 18) F1:QSAHRKN(SEQ ID NO:822) F2:TSSNRKT(SEQ ID NO:823) F3:RSDNLSA(SEQ ID NO:824) F4:RNNDRKT(SEQ ID NO:825) F5:TSGSLSR(SEQ ID NO:826) F6:QAGHLAK(SEQ ID NO:827); 19) F1:RSDHLSQ(SEQ ID NO:828) F2:ASSTRTK(SEQ ID NO:829) F3:RSDDLTR(SEQ ID NO:830) F4:QKSNLSS(SEQ ID NO:831) F5:QSANRTT(SEQ ID NO:832) F6:QNATRTK(SEQ ID NO:833); 20) F1:RSDTLSE(SEQ ID NO:834) F2:RRWTLVG(SEQ ID NO:835) F3:DRSNLSR(SEQ ID NO:836) F4:QSGDLTR(SEQ ID NO:837) F5:QSSDLSR(SEQ ID NO:838) F6:YHWYLKK(SEQ ID NO:839); 21) F1:RSANLAR(SEQ ID NO:840) F2:RSDNLRE(SEQ ID NO:841) F3:RPYTLRL(SEQ ID NO:842) F4:HRSNLNK(SEQ ID NO:843) F5:QSGSLTR(SEQ ID NO:844) F6:TSANLSR(SEQ ID NO:845); 22) F1:RSDDLVR(SEQ ID NO:846) F2:TSGSLVR(SEQ ID NO:847) F3:RSDKLVR(SEQ ID NO:848) F4:RSDELVR(SEQ ID NO:849) F5:TSHSLTE(SEQ ID NO:850) F6:RADNLTE(SEQ ID NO:851); 23) F1:ERSHLRE(SEQ ID NO:852) F2:TSHSLTE(SEQ ID NO:853) F3:QAGHLAS(SEQ ID NO:854) F4:TSHSLTE(SEQ ID NO:855) F5:DPGHLVR(SEQ ID NO:856) F6:TSGNLVR(SEQ ID NO:857); 24) F1:RADNLTE(SEQ ID NO:858) F2:TSGSLVR(SEQ ID NO:859) F3:RKDNLKN(SEQ ID NO:860) F4:QSSSLVR(SEQ ID NO:861) F5:RSDKLVR(SEQ ID NO:862) F6:DSGNLRV(SEQ ID NO:863); 25) F1:QSSSLVR(SEQ ID NO:864) F2:QSGDLRR(SEQ ID NO:865) F3:RSDERKR(SEQ ID NO:866) F4:HRTTLTN(SEQ ID NO:867) F5:RSDHLTN(SEQ ID NO:868) F6:TSGELVR(SEQ ID NO:869); 26) F1:QSGDLRR(SEQ ID NO:870) F2:RSDERKR(SEQ ID NO:871) F3:HRTTLTN(SEQ ID NO:872) F4:RSDHLTN(SEQ ID NO:873) F5:TSGELVR(SEQ ID NO:874) F6:RSDDLVR(SEQ ID NO:875); 27) F1:QRAHLER(SEQ ID NO:876) F2:QLAHLRA(SEQ ID NO:877) F3:DPGHLVR(SEQ ID NO:878) F4:RRSACRR(SEQ ID NO:879) F5:RSDHLTT(SEQ ID NO:880) F6:QSSSLVR(SEQ ID NO:881); and 28) F1:QSSNLVR(SEQ ID NO:882) F2:RSDDLVR(SEQ ID NO:883) F3:THLDLIR(SEQ ID NO:884) F4:TSGNLTE(SEQ ID NO:885) F5:RRSACRR(SEQ ID NO:886) F6:RNDTLTE(SEQ ID NO:887).

[0044] In any of the embodiments herein, the engineered zinc finger protein comprises the sequence set forth in any one of SEQ ID NOS: 692-719, or a portion thereof, or an amino acid sequence that has at least 90%, 91%, 92%, 93%, 94%, 95%, 96%, 97%, 98%, or 99% sequence identity thereto. In some embodiments, the engineered zinc finger protein is encoded by the sequence set forth in any one of SEQ ID NOS:888-915, or a portion thereof, or nucleotide sequence that has at least 90%, 91%, 92%, 93%, 94%, 95%, 96%, 97%, 98%, or 99% sequence identity thereto.

[0045] Also provided herein is an epigenetic-modifying DNA-targeting system comprising: a) an engineered zinc finger protein that binds to a target site in one or more HBV genes or regulatory elements thereof, and b) at least one effector domain that represses transcription of one or more HBV genes, wherein the zinc finger protein comprises six zinc fingers denoted F1 through F6 in order from N-terminus to C-terminus, and wherein the amino acid sequence of each zinc finger recognition region is as follows: F1:QSAHRKN(SEQ ID NO:822) F2:TSSNRKT(SEQ ID NO:823) F3:RSDNLSA(SEQ ID NO:824) F4:RNNDRKT(SEQ ID NO:825) F5:TSGSLSR(SEQ ID NO:826) F6:QAGHLAK(SEQ ID NO:827).

[0046] In any of the embodiments herein, the eZFP comprises the sequence set forth in SEQ ID NO: 709, or a portion thereof, or an amino acid sequence that has at least 90%, 91%, 92%, 93%, 94%, 95%, 96%, 97%, 98%, or 99% sequence identity thereto. In some embodiments, the engineered zinc finger protein comprises the sequence set forth in any one of SEQ ID NOS: 709.

[0047] In any of the embodiments herein, the engineered zinc finger protein is encoded by the sequence set forth in SEQ ID NO:905, or a portion thereof, or nucleotide sequence that has at least 90%, 91%, 92%, 93%, 94%, 95%, 96%, 97%, 98%, or 99% sequence identity thereto. In any of the embodiments herein, the engineered zinc finger protein is encoded by the sequence set forth in any one of SEQ ID NOS:905.

[0048] Also provided herein is an epigenetic-modifying DNA-targeting system comprising: a) an engineered zinc finger protein that binds to a target site in one or more HBV genes or regulatory elements thereof, and b) at least one effector domain that represses transcription of one or more HBV genes, wherein the zinc finger protein comprises six zinc fingers denoted F1 through F6 in order from N-terminus to C-terminus, and wherein the amino acid sequence of each zinc finger recognition region is as follows: F1:RSDHLSQ(SEQ ID NO:828) F2:ASSTRTK(SEQ ID NO:829) F3:RSDDLTR(SEQ ID NO:830) F4:QKSNLSS(SEQ ID NO:831) F5:QSANRTT(SEQ ID NO:832) F6:QNATRTK(SEQ ID NO:833). In some embodiments, the engineered zinc finger protein comprises the sequence set forth in SEQ ID NO: 710, or a portion thereof, or an amino acid sequence that has at least 90%, 91%, 92%, 93%, 94%, 95%, 96%, 97%, 98%, or 99% sequence identity thereto. In some embodiments, the engineered zinc finger protein comprises the sequence set forth in any one of SEQ ID NOS: 710. In any of the embodiments herein, the engineered zinc finger protein is encoded by the sequence set forth in SEQ ID NO:906, or a portion thereof, or nucleotide sequence that has at least 90%, 91%, 92%, 93%, 94%, 95%, 96%, 97%, 98%, or 99% sequence identity thereto. In any of the embodiments herein, the engineered zinc finger protein is encoded by the sequence set forth in any one of SEQ ID NOS: 906.

[0049] Also provided herein is an epigenetic-modifying DNA-targeting system comprising: a) an engineered zinc finger protein that binds to a target site in one or more HBV genes or regulatory elements thereof, and b) at least one effector domain that represses transcription of one or more HBV genes, wherein the zinc finger protein comprises six zinc fingers denoted F1 through F6 in order from N-terminus to C-terminus, and wherein the amino acid sequence of each zinc finger recognition region is as follows: F1:QSSSLVR(SEQ ID NO:864) F2:QSGDLRR(SEQ ID NO:865) F3:RSDERKR(SEQ ID NO:866) F4:HRTTLTN(SEQ ID NO:867) F5:RSDHLTN(SEQ ID NO:868) F6:TSGELVR(SEQ ID NO:869). In some embodiments, the engineered zinc finger protein comprises the sequence set forth in SEQ ID NO: 716, or a portion thereof, or an amino acid sequence that has at least 90%, 91%, 92%, 93%, 94%, 95%, 96%, 97%, 98%, or 99% sequence identity thereto. In some embodiments, the engineered zinc finger protein comprises the sequence set forth in any one of SEQ ID NOS: 716. In some embodiments, the engineered zinc finger protein is encoded by the sequence set forth in SEQ ID NO:912, or a portion thereof, or nucleotide sequence that has at least 90%, 91%, 92%, 93%, 94%, 95%, 96%, 97%, 98%, or 99% sequence identity thereto. In some embodiments, the engineered zinc finger protein is encoded by the sequence set forth in any one of SEQ ID NOS:912.

[0050] In any of the embodiments herein, the at least one effector domain induces transcription repression. In any of the embodiments herein, at least one effector domain is a DNA methyltransferase. In any of the embodiments herein, at least one effector domain comprises a DNA methyltransferase and a repressor domain capable of recruiting heterochromatin inducing factors or optionally wherein the heterochromatin inducing factors include a histone methyltransferase. In any of the embodiments herein, the at least one effector domain comprises a DNA methyltransferase and a histone methyltransferase. In any of the embodiments herein, at least one effector domain is selected from a KRAB repressor domain, ERF repressor domain, Mxi1 repressor domain, SID4X repressor domain, Mad-SID repressor domain. LSD1 repressor domain, or DNMT3A, DNMT3A-3L, DNMT3A/L-KRAB fusion repressor domain, DNMT3B domain binding protein, EZH2 repressor domain, or LSD1 repressor domain, or variant of any of the foregoing. In any of the embodiments herein, at least one effector domain comprises a sequence selected from any one of SEQ ID NOS: 590, or 600-608, 651, 661, 664, 665, 666, 668 and 669 or a domain thereof, a portion thereof, or an amino acid sequence that has at least 90%, 91%, 92%, 93%, 94%, 95%, 96%, 97%, 98%, or 99% sequence identity to any of the foregoing. In any of the embodiments herein, the at least one effector domain comprises a KRAB domain or a variant thereof. In any of the embodiments herein, the at least one effector domain comprises the sequence set forth in SEQ ID NO: 590, a portion thereof, or an amino acid sequence that has at least 90%, 91%, 92%, 93%, 94%, 95%, 96%, 97%, 98%, or 99% sequence identity to any of the foregoing. In any of the embodiments herein, the at least one effector domain comprises a DNMT3A/L domain or a variant thereof. In any of the embodiments herein, the at least one effector domain comprises the sequence set forth in SEQ ID NOS: 604 and 607, a portion thereof, or an amino acid sequence that has at least 90%, 91%, 92%, 93%, 94%, 95%, 96%, 97%, 98%, or 99% sequence identity to any of the foregoing; or the at least one effector domain comprises the sequence set forth in SEQ ID NO: 651, a portion thereof, or an amino acid sequence that has at least 90%, 91%, 92%, 93%, 94%, 95%, 96%, 97%, 98%, or 99% sequence identity to SEQ ID NO:651.

[0051] In any of the embodiments herein, the fusion protein comprises a DNMT3A/3L-dSpCas9-KRAB fusion protein. In any of the embodiments herein, the fusion protein comprises the sequence set forth in SEQ ID NO: 645 a portion thereof, or an amino acid sequence that has at least 90%, 91%, 92%, 93%, 94%, 95%, 96%, 97%, 98%, or 99% sequence identity to any of the foregoing.

[0052] In any of the embodiments herein, the at least one effector domain is fused to the N-terminus, the C-terminus, or both the N-terminus and the C-terminus, of the DNA-binding domain or a component thereof.

[0053] In any of the embodiments herein, the fusion protein is encoded by the sequence set forth in SEQ ID NO: 680, a portion thereof, or an nucleic acid sequence that has at least 90%, 91%, 92%, 93%, 94%, 95%, 96%, 97%, 98%, or 99% sequence identity to any of the foregoing. In any of the embodiments herein, the fusion protein is encoded by the sequence set forth in SEQ ID NO: 680.

[0054] In any of the embodiments herein, the fusion protein is encoded by the sequence set forth in any one of SEQ ID NOS:916-943, a portion thereof, or a nucleic acid sequence that has at least 90%, 91%, 92%, 93%, 94%, 95%, 96%, 97%, 98%, or 99% sequence identity to any of the foregoing. In any of the embodiments herein, the fusion protein comprises the sequence set forth in any one of SEQ ID NOS:944-971, a portion thereof, or an amino acid sequence that has at least 90%, 91%, 92%, 93%, 94%, 95%, 96%, 97%, 98%, or 99% sequence identity to any of the foregoing. In any of the embodiments herein, the fusion protein comprises the sequence set forth in any one of SEQ ID NOS: 961, 962, or 968.

[0055] In any of the embodiments herein, the fusion protein comprises a DNMT3A/3L-eZFP-KRAB fusion protein.

[0056] In any of the embodiments herein, the fusion protein is encoded by the sequence set forth in any one of SEQ ID NOS:972-999, a portion thereof, or nucleic acid sequence that has at least 90%, 91%, 92%, 93%, 94%, 95%, 96%, 97%, 98%, or 99% sequence identity to any of the foregoing. In any of the embodiments herein, the fusion protein is encoded by the sequence set forth in any one of SEQ ID NOS:933, 934, or 940, a portion thereof, or a nucleic acid sequence that has at least 90%, 91%, 92%, 93%, 94%, 95%, 96%, 97%, 98%, or 99% sequence identity to any of the foregoing. In any of the embodiments herein, the fusion protein comprises the sequence set forth in any one of SEQ ID NOS:1000-1027, a portion thereof, or an amino acid sequence that has at least 90%, 91%, 92%, 93%, 94%, 95%, 96%, 97%, 98%, or 99% sequence identity to any of the foregoing. In any of the embodiments herein, the fusion protein comprises the sequence set forth in any one of SEQ ID NOS:1017, 1018, or 1024, a portion thereof, or an amino acid sequence that has at least 90%, 91%, 92%, 93%, 94%, 95%, 96%, 97%, 98%, or 99% sequence identity to any of the foregoing.

[0057] In any of the embodiments herein, the fusion protein further comprises one or more nuclear localization signals (NLS).

[0058] In any of the embodiments herein, the fusion protein further comprises one or more linkers connecting two or more of: the DNA-binding domain, the at least one effector domain, and the one or more nuclear localization signals.

[0059] In any of the embodiments herein, the DNA-targeting system targets all Hepatitis B viral genomes.

[0060] In any of the embodiments herein, the DNA-targeting system targets at least 70% of all Hepatitis B viral genomes. In any of the embodiments herein, the DNA-targeting system targets at least 60% of all Hepatitis B viral genomes. In any of the embodiments herein, the DNA-targeting system targets at least 50% of all Hepatitis B viral genomes.

[0061] In any of the embodiments herein, the DNA-targeting system is not able to introduce a genetic disruption or a DNA break at or near the target site.

[0062] In any of the embodiments herein, repressing transcription of one or more HBV genes results in a reduction in RNA levels and/or protein levels from the HBV DNA sequence. In any of the embodiments herein, repressing transcription comprises a reduction in total Hepatitis B viral RNA transcript levels. In any of the embodiments herein, repressing transcription comprises a reduction in Hepatitis B pre-core (“preC”), pre-genomic (“pgRNA”), preS1, preS2/S, and HBx levels. In any of the embodiments herein, repressing transcription comprises a reduction in HBx levels. In any of the embodiments herein, repressing transcription comprises a reduction in Hepatitis B surface antigen (HBsAg) and/or Hepatitis B viral core-related-antigen (HbcrAg) protein levels. In any of the embodiments herein, repressing transcription comprises a reduction in HbsAg transcript and/or protein levels by at least 90%. In any of the embodiments herein, repressing transcription comprises a reduction in HbcrAg transcript and/or protein levels by at least 50% from the cccDNA.

[0063] Also provided herein is a guide RNA (gRNA) that binds a target site in a Hepatitis B viral DNA sequence. In some embodiments, the Hepatitis B viral DNA sequence is Hepatitis B (HBV) gene or regulatory element thereof. In some embodiments, the target site is present in a covalently closed circular DNA (cccDNA) form, relaxed circular DNA (rcDNA) form and/or is integrated in the human genomic DNA. In any of the embodiments herein, the target site is at or near a gene or a regulatory element thereof involved in controlling HBV replication and/or HBV transcription. In any of the embodiments herein, the gene involved in controlling HBV replication and/or HBV transcription encodes a polymerase, an envelope protein, capsid protein, transcription factor, or transcriptional transactivator. In any of the embodiments herein, the gene involved in controlling HBV replication and/or HBV transcription is a polymerase gene, S-family gene, X-gene, or core-family gene. In any of the embodiments herein, the target site is in gene or regulatory element thereof of the X-gene encoding Hepatitis B Virus Protein X (HBx). In any of the embodiments herein, the target site is at or near a regulatory element involved in controlling HBV replication and/or HBV transcription.

[0064] In any of the embodiments herein, the regulatory element is a promoter region. In any of the embodiments herein, the promoter region is a pre-S1 promoter, a pre-S2 promoter, X promoter, or basal core promoter. In any of the embodiments herein, the regulatory element is an enhancer region. In any of the embodiments herein, the enhancer region is an Enh1 or an Enh2 enhancer region. In any of the embodiments herein, the regulatory element is a transcript processing control region.

[0065] In any of the embodiments herein, the target site is a coding region. In any of the embodiments herein, the target site is located within 500 bp, within 1000 bp, within 1500 bp of a transcription start site. In any of the embodiments herein, the target site is positioned within a target region that is located at base pairs between 0-3300 base pairs (bp) of the HBV genome, optionally between 0-3189 bp corresponding to positions with reference to the HBV genome set forth in SEQ ID NO: 650. In any of the embodiments herein, the target site is positioned within a target region that is located at base pairs between 43 bp-490 bp, 1033 bp-1749 bp, 1800 bp-1950 bp, or 2953 bp-3182 bp of the HBV genome corresponding to positions with reference to the HBV genome set forth in SEQ ID NO: 650. In any of the embodiments herein, the target site is positioned within a target region that is located at base pairs between 1 bp-42 bp, 491 bp-1032 bp, 1750 bp-1799 bp, or 1951 bp-2952 bp of the HBV genome corresponding to positions with reference to the HBV genome set forth in SEQ ID NO: 650.

[0066] In any of the embodiments herein, the target site, or each of the target sites, is in a CpG island of the HBV genome. In any of the embodiments herein, the target sit is positioned within a target region that is located at base pairs between 67 bp-392 bp, 1033 bp-1749 bp, or 2215 bp-2490 bp of the HBV genome corresponding to positions with reference to the HBV genome set forth in SEQ ID NO: 650. In any of the embodiments herein, the target sit is positioned within a target region that is located at base pairs between 1033 bp-1749 bp of the HBV genome corresponding to positions with reference to the HBV genome set forth in SEQ ID NO: 650. In any of the embodiments herein, the target site, or each of the target sites, is within a target region spanning within 300 base pairs upstream of the hepatitis B X protein (HBx) start codon.

[0067] Also provided herein is a gRNA (gRNA) that binds a target site within a target region spanning within 300 base pairs upstream of the hepatitis B X protein (HBx) start codon. In any of the embodiments herein, the target site is positioned in the HBx basal core promoter region. In any of the embodiments herein, the target site is positioned within the HBx promoter/Enhancer region. In any of the embodiments herein, the target site is within a target region spanning within 250 base pairs upstream of the hepatitis B X protein (HBx) start codon. In any of the embodiments herein, the target site is within a target region spanning 1060-1480 bp of the HBV genome corresponding to positions with reference to the HBV genome set forth in SEQ ID NO: 650. In any of the embodiments herein, the target site is within a target region spanning within 150 base pairs upstream of the hepatitis B X protein (HBx) start codon. In any of the embodiments herein, the target site is within a target region spanning within 120 base pairs upstream of the hepatitis B X protein (HBx) start codon. In any of the embodiments herein, the target site is within a target region sequence corresponding to the sequence spanning 1250-1374 bp of the HBV genome with reference to the HBV genome set forth in SEQ ID NO: 650. In any of the embodiments herein, the target site is within a target region sequence corresponding to the sequence spanning 1255-1302 bp of the HBV genome with reference to the HBV genome set forth in SEQ ID NO: 650. In any of the embodiments herein, the target site, is within a target region sequence corresponding to the sequence spanning 1260-1300 bp of the HBV genome with reference to the HBV genome set forth in SEQ ID NO: 650. In any of the embodiments herein, the gRNA comprises the sequence set forth in any one of SEQ ID NOS: 200, 201, 207, 217, 221, 224, 233, 237, 238, 246, 251, 256, 258, 263, 267, 274, 270, 277, 279, 283, 284, 293, 294, 308, 311, 313, 316, 319, 320, 325, 328, 330, 333, 338, 345, 347, 350, 353, 359, 360, 369, 370, 371, 377, 380, 384, 385, or 387, a contiguous portion thereof of at least 14 nucleotides, or a complementary sequence of any of the foregoing, optionally wherein the gRNA, or each of the gRNA, is set forth in any one of SEQ ID NOS: 395, 402, 408, 412, 416, 419, 428, 432, 433, 441, 446, 451, 453, 458, 462, 465, 469, 472, 474, 478, 479, 488, 489, 503, 506, 508, 511, 514, 515, 520, 523, 525, 575, 528, 533, 540, 542, 545, 548, 554, 555, 565, 566, 572, 579, 580, or 582. In any of the embodiments herein, the gRNA is set forth in any one of SEQ ID NOS: 395, 402, 408, 412, 416, 419, 428, 432, 433, 441, 446, 451, 453, 458, 462, 465, 469, 472, 474, 478, 479, 488, 489, 503, 506, 508, 511, 514, 515, 520, 523, 525, 575, 528, 533, 540, 542, 545, 548, 554, 555, 565, 566, 572, 579, 580, or 582. In any of the embodiments herein, the gRNA comprises the sequence set forth in any one of SEQ ID NOS: 207, 213, 215, 217, 221, 222, 241, 245, 258, 261, 268, 274, 380, 387, a contiguous portion thereof of at least 14 nucleotides, or a complementary sequence of any of the foregoing, optionally wherein the gRNA, or each of the gRNA, is set forth in any one of SEQ ID NOS: 402, 408, 410, 412, 416, 417, 436, 440, 453, 456, 463, 469, 575, or 582. In any of the embodiments herein, the gRNA comprises the sequence set forth in any one of SEQ ID NOS: 402, 408, 410, 412, 416, 417, 436, 440, 453, 456, 463, 469, 575, or 582. In any of the embodiments herein, the gRNA comprises the sequence set forth in SEQ ID NO: 217, a contiguous portion thereof of at least 14 nucleotides, or a complementary sequence of any of the foregoing, optionally wherein the gRNA, or each of the gRNA, is set forth in any one of SEQ ID NO: 412. In any of the embodiments herein, the gRNA comprises the sequence set forth in SEQ ID NO: 412.

[0068] Also provided herein is a CRISPR Cas-guide RNA (gRNA) combination comprising: (a) a Clustered Regularly Interspaced Short Palindromic Repeats associated (Cas) protein or variant thereof; and (b) at least one gRNA of any of claims 165-202 that targets the Cas protein or variant thereof to a target site in target site in a Hepatitis B viral DNA sequence. In some embodiments, the Cas protein or a variant thereof is a Cas9 protein or a variant thereof. In any of the embodiments herein, the Cas protein or a variant thereof is a variant Cas protein, wherein the variant Cas protein lacks nuclease activity or is a deactivated Cas (dCas) protein. In any of the embodiments herein, the variant Cas protein is a variant Cas9 protein that lacks nuclease activity or that is a deactivated Cas9 (dCas9) protein. In any of the embodiments herein, the Cas9 protein or a variant thereof is a Staphylococcus aureus Cas9 (SaCas9) protein or a variant thereof. In some embodiments, the variant Cas9 is a Staphylococcus aureus dCas9 protein (dSaCas9) that comprises at least one amino acid mutation selected from D10A and N580A, with reference to numbering of positions of SEQ ID NO: 596. In some embodiments, the variant Cas9 protein comprises the sequence set forth in SEQ ID NO: 597, or an amino acid sequence that has at least 90%, 91%, 92%, 93%, 94%, 95%, 96%, 97%, 98%, or 99% sequence identity thereto. In some embodiments, the Cas9 protein or variant thereof is a Streptococcus pyogenes Cas9 (SpCas9) protein or a variant thereof. In some embodiments, the variant Cas9 is a Streptococcus pyogenes dCas9 (dSpCas9) protein that comprises at least one amino acid mutation selected from D10A and H840A, with reference to numbering of positions of SEQ ID NO: 598. In some embodiments, the variant Cas9 protein comprises the sequence set forth in SEQ ID NO: 599, or an amino acid sequence that has at least 90%, 91%, 92%, 93%, 94%, 95%, 96%, 97%, 98%, or 99% sequence identity thereto.

[0069] Also provided is a polynucleotide encoding the epigenetic-modifying DNA-targeting system disclosed herein or a fusion protein of the DNA-targeting system disclosed herein, the gRNA disclosed herein, the CRISPR Cas-gRNA combination disclosed herein, or a portion or a component of any of the foregoing.

[0070] Also provided is a plurality of polynucleotides encoding the epigenetic-modifying DNA-targeting system disclosed herein or the fusion protein of the DNA-targeting system disclosed herein, the gRNA disclosed herein, the CRISPR Cas-gRNA combination disclosed herein, or a portion or a component of any of the foregoing.

[0071] Also provided is a vector comprising the polynucleotide disclosed herein. Also provided is a vector comprising the plurality of polynucleotides disclosed herein.

[0072] In any of the embodiments herein, the vector is a viral vector. In some embodiments herein, the vector is an adeno-associated virus (AAV) vector. In some embodiments herein, the vector is selected from among AAV1, AAV2, AAV3, AAV4, AAV5, AAV6, AAV7, AAV8, or AAV9. In some embodiments herein, the vector is a lentiviral vector. In some embodiments herein, the vector is a non-viral vector. In some embodiments herein, the non-viral vector is selected from: a lipid nanoparticle, a liposome, an exosome, or a cell penetrating peptide. In any of the embodiments herein, the vector exhibits tropism towards a Hepatitis B virus infected cell. In any of the embodiments herein, the vector comprises one vector, or two or more vectors.

[0073] Also provided herein is a method of promoting epigenetic modification within a target region in a Hepatitis B viral sequence, the method comprising introducing an epigenetic modifying DNA-targeting system that targets a target site within the target region into an HBV infected cell comprising a Hepatitis viral sequence.

[0074] Also provided herein is a method of increasing CpG methylation within a target region in a Hepatitis B viral sequence, the method comprising introducing an epigenetic modifying DNA-targeting system that targets a target site within the target region into an HBV infected cell comprising a Hepatitis viral sequence.

[0075] Also provided herein is a method of promoting epigenetic modification of a target region in a Hepatitis B viral sequence, the method comprising introducing into an HBV infected cell comprising a Hepatitis B viral sequence an epigenetic modifying DNA-targeting system disclosed herein, the gRNA disclosed herein, the CRISPR Cas-gRNA combination disclosed herein, the polynucleotide disclosed herein, the plurality of polynucleotides disclosed herein, the vector disclosed herein, or a portion or a component of any of the foregoing.

[0076] Also provided herein is a method of increasing CpG methylation of a target region in a Hepatitis B viral sequence, the method comprising introducing into an HBV infected cell comprising a Hepatitis B viral sequence an epigenetic modifying DNA-targeting system disclosed herein, the gRNA disclosed herein, the CRISPR Cas-gRNA combination disclosed herein, the polynucleotide disclosed herein, the plurality of polynucleotides disclosed herein, the vector disclosed herein, or a portion or a component of any of the foregoing.

[0077] In any of the embodiments herein, the target region comprises a contiguous sequence of nucleotides within the sequence corresponding to 1033 bp-1749 bp in a Hepatitis B viral sequence with reference to nucleotide positions of SEQ ID NO: 650.

[0078] Also provided herein is a method of reducing transcription of one or more genes in an HBV infected cell comprising a Hepatitis B viral sequence, the method comprising introducing into the cell an epigenetic-modifying DNA-targeting system that induces targeted CpG methylation within in a Hepatitis B viral sequence with reference to nucleotide positions of SEQ ID NO: 650.

[0079] Also provided herein is a method of reducing Hepatitis B virus infection in an HBV infected cell comprising introducing into a cell comprising a Hepatitis B viral sequence an epigenetic-modifying DNA-targeting system that induces targeted CpG methylation within a target region in a Hepatitis B viral sequence with reference to nucleotide positions of SEQ ID NO: 650.

[0080] In any of the embodiments herein, the epigenetic modifying DNA-targeting system comprises at least one DNA-targeting module that comprises a fusion protein comprising (a) a DNA-binding domain for targeting a target site in a Hepatitis B viral DNA sequence; and (b) at least one effector domain comprising a DNA methyltransferase effector domain.

[0081] In any of the embodiments herein, the region of CpG methylation is within 500 base pairs of the target region. In any of the embodiments herein, the introducing occurs in vivo in a subject or ex vivo.

[0082] In any of the embodiments herein, the cell is a mammalian cell. In any of the embodiments herein, the cell is a human cell. In any of the embodiments herein, the cell comprises integrated HBV DNA. In any of the embodiments herein, the cell is a hepatocyte comprising a pool of episomal HBV cccDNA. In some embodiments, the hepatocyte expresses HBV proteins, wherein the HBV proteins are HBsAg, HBeAg, or HBcrAg, or combinations of the foregoing.

[0083] Also provided herein is a method of reducing Hepatitis virus infection in a subject comprising administering to a subject infected with Hepatitis B an epigenetic modifying DNA-targeting system that increases CpG methylation within a target region in a Hepatitis B viral sequence, wherein the epigenetic modifying DNA-targeting system comprises (a) a DNA-binding domain for targeting to the target site in a Hepatitis B viral DNA sequence; and (b) at least one effector domain comprising a DNA methyltransferase effector domain.

[0084] In any of the embodiments herein, the target region is a region that comprises CpGs in the HBV genome. In any of the embodiments herein, the target region comprises a contiguous sequence of nucleotides within the sequence corresponding to 67 bp-392 bp, 1033 bp-1749 bp, or 2215 bp-2490 bp in a Hepatitis B viral sequence with reference to nucleotide positions of SEQ ID NO: 650. In any of the embodiments herein, the target region comprises a contiguous sequence of nucleotides within the sequence corresponding to 1033 bp-1749 bp in a Hepatitis B viral sequence with reference to nucleotide positions of SEQ ID NO: 650. In any of the embodiments herein, the target region is located within 300 base pairs upstream of the hepatitis B X protein (HBx) start codon. In any of the embodiments herein, the target region is within the HBx basal core promoter region. In any of the embodiments herein, the target region is within the HBx promoter/Enhancer region. In any of the embodiments herein, the target region is within 250 base pairs upstream of the hepatitis B X protein (HBx) start codon. In any of the embodiments herein, the target region comprises a contiguous sequence of nucleotides within the sequence corresponding to 1060 bp-1480 bp in a Hepatitis B viral sequence with reference to nucleotide positions of SEQ ID NO: 650. In any of the embodiments herein, the target region is within 150 base pairs upstream of the hepatitis B X protein (HBx) start codon. In any of the embodiments herein, the target region is within 120 base pairs upstream of the hepatitis B X protein (HBx) start codon. In any of the embodiments herein, the target region comprises a contiguous sequence of nucleotides within the sequence corresponding to 1250 bp-1374 bp in a Hepatitis B viral sequence with reference to nucleotide positions of SEQ ID NO: 650. In some embodiments, the target region has the sequence set forth in SEQ ID NO: 1068. In any of the embodiments herein, the target region comprises a contiguous sequence of nucleotides within the sequence corresponding to 1260 bp-1300 bp in a Hepatitis B viral sequence with reference to nucleotide positions of SEQ ID NO: 650. In some embodiments the target region has the sequence set forth in SEQ ID NO: 1070.

[0085] In any of the embodiments herein, the DNA-binding domain comprises a Clustered Regularly Interspaced Short Palindromic Repeats associated (Cas)-guide RNA (gRNA) combination comprising (a) a Cas protein or a variant thereof and (b) at least one gRNA; a zinc finger protein (ZFP); a transcription activator-like effector (TALE); a meganuclease; a homing endonuclease; or an I-SceI enzyme or a variant thereof, optionally wherein the DNA-binding domain comprises a catalytically inactive variant of any of the foregoing.

[0086] In any of the embodiments herein, the method comprises a CRISPR Cas-guide RNA (gRNA) combination comprising: (a) a Clustered Regularly Interspaced Short Palindromic Repeats associated (Cas) protein or variant thereof; and (b) at least one gRNA of any of claims 165-202 that targets the Cas protein or variant thereof to a target site in target site in a Hepatitis B viral DNA sequence.

[0087] In any of the embodiments herein, the target site, or each of the target sites comprises the sequence set forth in any one of SEQ ID NOs: 5, 6, 12, 18, 22, 26, 29, 38, 42, 43, 51, 56, 61, 63, 68, 72, 75, 79, 82, 84, 88, 89, 98, 99, 113, 116, 121, 124, 125, 118, 130, 133, 135, 138, 143, 150, 152, 155, 158, 164, 165, 175, 176, 182, 185, 189, 190, 192, a contiguous portion thereof of at least 14 nucleotides (nt), or a complementary sequence of any of the foregoing. In any of the embodiments herein, the target site, or each of the target sites comprises the sequence set forth in any one of SEQ ID NOs: 12, 18, 20, 22, 26, 27, 46, 50, 63, 66, 73, 79, 185, 192t, a contiguous portion thereof of at least 14 nucleotides (nt), or a complementary sequence of any of the foregoing. In any of the embodiments herein, the target site, or each of the target sites comprises the sequence set forth in SEQ ID NO:22, a contiguous portion thereof of at least 14 nucleotides (nt), or a complementary sequence of any of the foregoing. In any of the embodiments herein, the gRNA wherein the gRNA, or each of the gRNA, comprises the sequence set forth in any one of SEQ ID NOS: 200, 201, 207, 217, 221, 224, 233, 237, 238, 246, 251, 256, 258, 263, 267, 274, 270, 277, 279, 283, 284, 293, 294, 308, 311, 313, 316, 319, 320, 325, 328, 330, 333, 338, 345, 347, 350, 353, 359, 360, 370, 371, 377, 380, 384, 385, 387, a contiguous portion thereof of at least 14 nucleotides, or a complementary sequence of any of the foregoing, optionally wherein the gRNA, or each of the gRNA, is set forth in any one of SEQ ID NOS: 395, 402, 408, 412, 416, 419, 428, 432, 433, 441, 446, 451, 453, 458, 462, 465, 469, 472, 474, 478, 479, 488, 489, 503, 506, 508, 511, 514, 515, 520, 523, 525, 575, 528, 533, 540, 542, 545, 548, 554, 555, 565, 566, 572, 579, 580, or 582. In any of the embodiments herein, the gRNA wherein the gRNA, or each of the gRNA, comprises the sequence set forth in any one of SEQ ID NOS: 207, 213, 215, 217, 221, 222, 241, 245, 258, 261, 268, 274, 380, 387, a contiguous portion thereof of at least 14 nucleotides, or a complementary sequence of any of the foregoing, optionally wherein the gRNA, or each of the gRNA, is set forth in any one of SEQ ID NOS: 402, 408, 410, 412, 416, 417, 436, 440, 453, 456, 463, 469, 575, 582. In any of the embodiments herein, the gRNA, or each of the gRNA, comprises the sequence set forth in any one of SEQ ID NO: 217, a contiguous portion thereof of at least 14 nucleotides, or a complementary sequence of any of the foregoing, optionally wherein the gRNA, or each of the gRNA, is set forth in any one of SEQ ID NO: 412.

[0088] In any of the embodiments herein, the at least one DNA-binding domain comprises an engineered zinc finger protein (eZFP). In any of the embodiments herein, the target site comprises the nucleotide sequence set forth in any one of SEQ ID NOS: 1045, 1046, 1052, a contiguous portion thereof of at least 12 nt, or a complementary sequence of any of the foregoing. In any of the embodiments herein, the target site comprises the nucleotide sequence set forth in any one of SEQ ID NOS: 1045, 1046, 1052.

[0089] In any of the embodiments herein, at least one effector domain is a DNA methyltransferase. In any of the embodiments herein, at least one effector domain comprises a DNA methyltransferase and a repressor domain capable of recruiting heterochromatin inducing factors or optionally wherein the heterochromatin inducing factors include a histone methyltransferase. In any of the embodiments herein, the at least one effector domain comprises a DNA methyltransferase and a histone methyltransferase. In any of the embodiments herein, the at least one effector domain comprises a DNMT3A/L domain or a variant thereof. In any of the embodiments herein, the at least one effector domain comprises effector domain comprises the sequence set forth in SEQ ID NO: 604 and 607 a portion thereof, or an amino acid sequence that has at least 90%, 91%, 92%, 93%, 94%, 95%, 96%, 97%, 98%, or 99% sequence identity to any of the foregoing. In any of the embodiments herein, the at least one effector domain further comprises a KRAB domain or a variant thereof. In any of the embodiments herein, the at least one effector domain further comprises the sequence set forth in SEQ ID NO: 590 a portion thereof, or an amino acid sequence that has at least 90%, 91%, 92%, 93%, 94%, 95%, 96%, 97%, 98%, or 99% sequence identity to any of the foregoing. In any of the embodiments herein, the DNA-targeting system comprises a DNMT3A/3L-dSpCas9-KRAB domain or a variant thereof. In any of the embodiments herein, the DNA-targeting system comprises the sequence set forth in SEQ ID NO: 645 a portion thereof, or an amino acid sequence that has at least 90%, 91%, 92%, 93%, 94%, 95%, 96%, 97%, 98%, or 99% sequence identity to any of the foregoing.

[0090] In any of the embodiments herein, the DNA-targeting system comprises the sequence set forth in SEQ ID NO: 680 a portion thereof, or nucleic acid sequence that has at least 90%, 91%, 92%, 93%, 94%, 95%, 96%, 97%, 98%, or 99% sequence identity to the foregoing. In any of the embodiments herein, the DNA-targeting system comprises the sequence set forth in SEQ ID NO: 680.

[0091] Also provided herein is a method of repressing the transcription of one or more genes in Hepatitis B virus infected cell, the method comprising introducing into a Hepatitis B virus infected cell an epigenetic-modifying DNA-targeting system disclosed herein, the gRNA disclosed herein, the CRISPR Cas-gRNA combination disclosed herein, the polynucleotide disclosed herein, the plurality of polynucleotides disclosed herein, the vector disclosed herein, or a portion or a component of any of the foregoing. In some embodiments, the one or more genes are epigenetically modified by the DNA-targeting system. In some embodiments, the transcription of the one or more genes is reduced in comparison to a comparable cell not subjected to the method.

[0092] In any of the embodiments herein, the transcription of the one or more genes is reduced by at least about 1.25-fold, 1.5-fold, 1.75-fold, 2.0-fold, 2.5-fold, 2.75-fold, 3.0-fold, 3.5-fold, 3.75-fold, 4.0-fold, 4.5-fold, 4.75-fold, 5.0-fold, 5.25-fold, 5.5-fold, 5.75-fold, 6-fold. In any of the embodiments herein, repressing transcription of the one or more genes results in reduced HBV replication and/or HBV transcription. In any of the embodiments herein, the HBV infected cell is a mammalian cell.

[0093] In any of the embodiments herein, the HBV infected cell is a human cell. In any of the embodiments herein, the cell comprises integrated HBV DNA. In any of the embodiments herein, the cell is a hepatocyte comprising a pool of episomal HBV cccDNA. In any of the embodiments herein, the hepatocyte expresses HBV proteins, wherein the HBV proteins are HBsAg, and/or HBeAg. In any of the embodiments herein, the HBV infected cells in present in a subject.

[0094] In any of the embodiments herein, the subject is a human. In any of the embodiments herein, the subject has an HBV viral infection. In any of the embodiments herein, the subject has hepatocytes comprising integrated HBV DNA. In any of the embodiments herein, the subject has hepatocytes comprising a pool of episomal HBV cccDNA. In any of the embodiments herein, the subject has hepatocytes expressing HBV proteins, wherein the HBV proteins are HBsAg, HBeAg, or HBcrAg and combinations thereof.

[0095] In any of the embodiments herein, the subject has a disease, condition or disorder associated with the HBV viral infection. In any of the embodiments herein, the disease, condition, or disorder is a liver disease or a cancer. In any of the embodiments herein, the disease, condition, or disorder is acute hepatitis, chronic hepatitis, liver failure, or liver cirrhosis. In any of the embodiments herein, the disease, condition, or disorder is cancer, optionally wherein the cancer is hepatocellular cancer.

[0096] Also provided herein is a pharmaceutical composition comprising the vector disclosed herein. In any of the embodiments herein, the vector is conjugated to an amino sugar derivative of galactose, optionally wherein the vector is conjugated to an N-Acetylegalactosamine (GalNAc) moiety.

[0097] Also provided herein is a pharmaceutical composition comprising the epigenetic-modifying DNA-targeting system disclosed herein or the fusion protein disclosed herein, the gRNA disclosed herein, the CRISPR Cas-gRNA combination disclosed herein, the polynucleotide disclosed herein, the plurality of polynucleotides disclosed herein, the vector disclosed herein, or a portion or a component of any of the foregoing.

[0098] Also provided herein is a pharmaceutical composition for use in treating an HBV viral infection in a subject. In any of the embodiments herein, the subject has a disease, condition or disorder associated with the HBV viral infection.

[0099] Also provided herein is a pharmaceutical composition for use in treating a disease, disorder or condition in a subject associated with an HBV viral infection.

[0100] Also provided herein is a pharmaceutical composition for use in the manufacture of a medicament for treating an HBV viral infection in a subject. In some embodiments, the HBV viral infection is associated with a disease, disorder or condition.

[0101] Also provided herein is a pharmaceutical composition for use in the manufacture of a medicament for treating a disease, condition, or disorder in a subject associated with an HBV viral infection.

[0102] In any of the embodiments herein, the disease, condition, or disorder is liver disease or a cancer. In any of the embodiments herein, the disease, condition, or disorder is acute hepatitis, chronic hepatitis, liver failure, or liver cirrhosis. In any of the embodiments herein, the disease, condition, or disorder is cancer, optionally hepatocellular cancer. In any of the embodiments herein, the pharmaceutical composition is to be administered to the subject in vivo.

[0103] In any of the embodiments herein, following administration of the pharmaceutical composition, transcription of one or more HBV genes is repressed in cells of the subject. In any of the embodiments herein, the one or more HBV genes are involved in controlling HBV replication and/or HBV transcription. In any of the embodiments herein, the one or more genes is a polymerase gene, S-family gene, X-gene, or core family gene.

[0104] Also provided herein is a method for treating a disease, condition, or disorder in a subject in need thereof, comprising administering to the subject the epigenetic-modifying DNA-targeting system disclosed herein, the gRNA disclosed herein, the CRISPR Cas-gRNA combination disclosed herein, the polynucleotide disclosed herein, the plurality of polynucleotides disclosed herein, the vector disclosed herein, the pharmaceutical composition disclosed herein, or a portion or a component of any of the foregoing.

[0105] Also provided herein is a method of reducing Hepatitis B virus infection in a subject comprising administering to a subject that has a Hepatitis B virus infection, the epigenetic-modifying DNA-targeting system disclosed herein, the gRNA disclosed herein, the CRISPR Cas-gRNA combination disclosed herein, the polynucleotide disclosed herein, the plurality of polynucleotides disclosed herein, the vector disclosed herein, the pharmaceutical composition disclosed herein, or a portion or a component of any of the foregoing.

[0106] Also provided herein is an engineered zinc finger protein (eZFP) that binds to a target site in one or more HBV genes or regulatory elements thereof, wherein the target site is within a target region spanning 1033 bp-1749 bp of the HBV genome corresponding to positions with reference to the HBV genome set forth in SEQ ID NO: 650. In any of the embodiments herein, the target site is within a target region spanning within 300 base pairs upstream of the hepatitis B X protein (HBx) start codon. In any of the embodiments herein, the target site is positioned in the HBx basal core promoter region. In any of the embodiments herein, the target site is positioned within the HBx promoter/Enhancer region. In any of the embodiments herein, the target site is within a target region spanning within 250 base pairs upstream of the hepatitis B X protein (HBx) start codon. In any of the embodiments herein, the target site is within a target region spanning 1060-1480 bp of the HBV genome corresponding to positions with reference to the HBV genome set forth in SEQ ID NO: 650. In any of the embodiments herein, the target site is within a target region spanning within 150 base pairs upstream of the hepatitis B X protein (HBx) start codon. In any of the embodiments herein, the target site is within a target region spanning within 120 base pairs upstream of the hepatitis B X protein (HBx) start codon. In any of the embodiments herein, the target site is within a target region sequence corresponding to the sequence spanning 1250-1374 bp of the HBV genome with reference to the HBV genome set forth in SEQ ID NO: 650. In some embodiments, the target region has the sequence set forth in SEQ ID NO: 1068. In any of the embodiments herein, the target site is within a target region sequence corresponding to the sequence spanning 1255-1302 bp of the HBV genome with reference to the HBV genome set forth in SEQ ID NO: 650. In some embodiments, the target region has the sequence set forth in SEQ ID NO: 1069. In any of the embodiments herein, the target site, is within a target region sequence corresponding to the sequence spanning 1260-1300 bp of the HBV genome with reference to the HBV genome set forth in SEQ ID NO: 650. In some embodiments, the target region has the sequence set forth in SEQ ID NO: 1070. In any of the embodiments herein, the target site is within a target region sequence corresponding to the sequence spanning 1255 bp-1290 bp of the HBV genome with reference to the HBV genome set forth in SEQ ID NO: 650. In any of the embodiments herein, the target site comprises the nucleotide sequence set forth in any one of SEQ ID NOS: 1028-1055, a contiguous portion thereof of at least 12 nt, or a complementary sequence of any of the foregoing. In any of the embodiments herein, the target site comprises the nucleotide sequence set forth in any one of SEQ ID NOS: 1028-1055.

[0107] In any of the embodiments herein, the target site comprises the nucleotide sequence set forth in any one of SEQ ID NOS: 1045, 1046, or 1052, a contiguous portion thereof of at least 12 nt, or a complementary sequence of any of the foregoing. In any of the embodiments herein, the target site comprises the nucleotide sequence set forth in any one of SEQ ID NOS: 1045, 1046, or 1052.

[0108] In any of the embodiments herein, the zinc finger protein comprises six zinc fingers denoted F1 through F6 in order from N-terminus to C-terminus, and wherein the amino acid sequence of each zinc finger recognition region is as follows: 1) F1:SEADRSR(SEQ ID NO:720) F2:DRSNLTR(SEQ ID NO:721) F3:QSSDLSR(SEQ ID NO:722) F4:YHWYLKK(SEQ ID NO:723) F5:RSDSLSV(SEQ ID NO:724) F6:QNANRKT(SEQ ID NO:725); 2) F1:RSDVLST(SEQ ID NO:726) F2:DNSSRTR(SEQ ID NO:727) F3:RPYTLRL(SEQ ID NO:728) F4:DSSHRTR(SEQ ID NO:729) F5:RSDHLSQ(SEQ ID NO:730) F6:DSSHRTR(SEQ ID NO:731); 3) F1:RSDHLSQ(SEQ ID NO:732) F2:QSADRTK(SEQ ID NO:733) F3:RSDHLSQ(SEQ ID NO:734) F4:RRSDLKR(SEQ ID NO:735) F5:RSDHLSR(SEQ ID NO:736) F6:QSSDLRR(SEQ ID NO:737); 4) F1:RSDNLSE(SEQ ID NO:738) F2:TSSNRKT(SEQ ID NO:739) F3:DRSHLTR(SEQ ID NO:740) F4:RSDALTQ(SEQ ID NO:741) F5:DRSALAR(SEQ ID NO:742) F6:RRFTLSK(SEQ ID NO:743); 5) F1:RSDHLSE(SEQ ID NO:744) F2:QYSGRYY(SEQ ID NO:745) F3:HGQTLNE(SEQ ID NO:746) F4:QSGNLAR(SEQ ID NO:747) F5:RSDSLLR(SEQ ID NO:748)F6:CREYRGK(SEQ ID NO:749); 6) F1:QSANRTT(SEQ ID NO:750) F2:RSANLTR(SEQ ID NO:751) F3:RSDVLSE(SEQ ID NO:752) F4:TSGHLSR(SEQ ID NO:753) F5:QSSDLSR(SEQ ID NO:754), F6:QWSTRKR(SEQ ID NO:755); 7) F1:QSGNLAR(SEQ ID NO:756) F2:ATCCLAH(SEQ ID NO:757) F3:RWQYLPT(SEQ ID NO:758) F4:DRSALAR(SEQ ID NO:759) F5:RSDNLSE(SEQ ID NO:760)F6:KRCNLRC(SEQ ID NO:761); 8) F1:NPANLTR(SEQ ID NO:762) F2:QNATRTK(SEQ ID NO:763) F3:QSGHLAR(SEQ ID NO:764) F4:NRHDRAK(SEQ ID NO:765) F5:RSDHLSE(SEQ ID NO:766), F6:QRRSRYK(SEQ ID NO:767); 9) F1:QSSDLSR(SEQ ID NO:768) F2:HRSTRNR(SEQ ID NO:769) F3:RSDVLSA(SEQ ID NO:770) F4:DSRTRKN(SEQ ID NO:771) F5:QSGSLTR(SEQ ID NO:772) F6:DQSGLAH(SEQ ID NO:773); 10) F1:QNPAQWR(SEQ ID NO:774) F2:RSADLSR(SEQ ID NO:775) F3:TSGSLSR(SEQ ID NO:776) F4:RSDHLSR(SEQ ID NO:777) F5:RSDSLLR(SEQ ID NO:778) F6:QSYDRFQ(SEQ ID NO:779); 11) F1:TSGSLSR(SEQ ID NO:780) F2:RSDHLSR(SEQ ID NO:781) F3:RSDSLLR(SEQ ID NO:782) F4:QSYDRFQ(SEQ ID NO:783) F5:RSDNLST(SEQ ID NO:784) F6:DNRDRIK(SEQ ID NO:785); 12) F1:DRSNLSR(SEQ ID NO:786) F2:LRQNLIM(SEQ ID NO:787) F3:ERGTLAR(SEQ ID NO:788) F4:RSDALTQ(SEQ ID NO:789) F5:RSDSLSQ(SEQ ID NO:790) F6:RKADRTR(SEQ ID NO:791); 13) F1:QYCCLTN(SEQ ID NO:792) F2:TSGNLTR(SEQ ID NO:793) F3:QSSDLSR(SEQ ID NO:794) F4:FRYYLKR(SEQ ID NO:795) F5:QSGDLTR(SEQ ID NO:796) F6:DKGNLTK(SEQ ID NO:797); 14) F1:TSGSLSR(SEQ ID NO:798) F2:RSDNLTT(SEQ ID NO:799) F3:QSGNLAR(SEQ ID NO:800) F4:DRTTLMR(SEQ ID NO:801) F5:QSGHLAR(SEQ ID NO:802) F6:QLTHLNS(SEQ ID NO:803); 15) F1:IKHDLHR(SEQ ID NO:804) F2:RSANLTR(SEQ ID NO:805) F3:RSDNLAR(SEQ ID NO:806) F4:QNVSRPR(SEQ ID NO:807) F5:RSDDLSK(SEQ ID NO:808) F6:DSSHRTR(SEQ ID NO:809); 16) F1:RSDNLAR(SEQ ID NO:810) F2:QNVSRPR(SEQ ID NO:811) F3:RSDDLSK(SEQ ID NO:812) F4:DSSHRTR(SEQ ID NO:813) F5:TSSNRKT(SEQ ID NO:814) F6:AQWTRAC(SEQ ID NO:815); 17) F1:RSDDLSK(SEQ ID NO:816) F2:DSSHRTR(SEQ ID NO:817) F3:TSSNRKT(SEQ ID NO:818) F4:AQWTRAC(SEQ ID NO:819) F5:RKQTRTT(SEQ ID NO:820) F6:HRSSLRR(SEQ ID NO:821); 18) F1:QSAHRKN(SEQ ID NO:822) F2:TSSNRKT(SEQ ID NO:823) F3:RSDNLSA(SEQ ID NO:824) F4:RNNDRKT(SEQ ID NO:825) F5:TSGSLSR(SEQ ID NO:826) F6:QAGHLAK(SEQ ID NO:827); 19) F1:RSDHLSQ(SEQ ID NO:828) F2:ASSTRTK(SEQ ID NO:829) F3:RSDDLTR(SEQ ID NO:830) F4:QKSNLSS(SEQ ID NO:831) F5:QSANRTT(SEQ ID NO:832) F6:QNATRTK(SEQ ID NO:833); 20) F1:RSDTLSE(SEQ ID NO:834) F2:RRWTLVG(SEQ ID NO:835) F3:DRSNLSR(SEQ ID NO:836) F4:QSGDLTR(SEQ ID NO:837) F5:QSSDLSR(SEQ ID NO:838) F6:YHWYLKK(SEQ ID NO:839); 21) F1:RSANLAR(SEQ ID NO:840) F2:RSDNLRE(SEQ ID NO:841) F3:RPYTLRL(SEQ ID NO:842) F4:HRSNLNK(SEQ ID NO:843) F5:QSGSLTR(SEQ ID NO:844) F6:TSANLSR(SEQ ID NO:845); 22) F1:RSDDLVR(SEQ ID NO:846) F2:TSGSLVR(SEQ ID NO:847) F3:RSDKLVR(SEQ ID NO:848) F4:RSDELVR(SEQ ID NO:849) F5:TSHSLTE(SEQ ID NO:850) F6:RADNLTE(SEQ ID NO:851); 23) F1:ERSHLRE(SEQ ID NO:852) F2:TSHSLTE(SEQ ID NO:853) F3:QAGHLAS(SEQ ID NO:854) F4:TSHSLTE(SEQ ID NO:855) F5:DPGHLVR(SEQ ID NO:856) F6:TSGNLVR(SEQ ID NO:857); 24) F1:RADNLTE(SEQ ID NO:858) F2:TSGSLVR(SEQ ID NO:859) F3:RKDNLKN(SEQ ID NO:860) F4:QSSSLVR(SEQ ID NO:861) F5:RSDKLVR(SEQ ID NO:862) F6:DSGNLRV(SEQ ID NO:863); 25) F1:QSSSLVR(SEQ ID NO:864) F2:QSGDLRR(SEQ ID NO:865) F3:RSDERKR(SEQ ID NO:866) F4:HRTTLTN(SEQ ID NO:867) F5:RSDHLTN(SEQ ID NO:868) F6:TSGELVR(SEQ ID NO:869); 26) F1:QSGDLRR(SEQ ID NO:870) F2:RSDERKR(SEQ ID NO:871) F3:HRTTLTN(SEQ ID NO:872) F4:RSDHLTN(SEQ ID NO:873) F5:TSGELVR(SEQ ID NO:874) F6:RSDDLVR(SEQ ID NO:875); 27) F1:QRAHLER(SEQ ID NO:876) F2:QLAHLRA(SEQ ID NO:877) F3:DPGHLVR(SEQ ID NO:878) F4:RRSACRR(SEQ ID NO:879) F5:RSDHLTT(SEQ ID NO:880) F6:QSSSLVR(SEQ ID NO:881); and 28) F1:QSSNLVR(SEQ ID NO:882) F2:RSDDLVR(SEQ ID NO:883) F3:THLDLIR(SEQ ID NO:884) F4:TSGNLTE(SEQ ID NO:885) F5:RRSACRR(SEQ ID NO:886) F6:RNDTLTE(SEQ ID NO:887).

[0109] In any of the embodiments herein, the zinc finger protein comprises six zinc fingers denoted F1 through F6 in order from N-terminus to C-terminus, and wherein the amino acid sequence of each zinc finger recognition region is as follows: F1:QSAHRKN(SEQ ID NO:822) F2:TSSNRKT(SEQ ID NO:823) F3:RSDNLSA(SEQ ID NO:824) F4:RNNDRKT(SEQ ID NO:825) F5:TSGSLSR(SEQ ID NO:826) F6:QAGHLAK(SEQ ID NO:827).

[0110] In any of the embodiments herein, the zinc finger protein comprises six zinc fingers denoted F1 through F6 in order from N-terminus to C-terminus, and wherein the amino acid sequence of each zinc finger recognition region is as follows: F1:RSDHLSQ(SEQ ID NO:828) F2:ASSTRTK(SEQ ID NO:829) F3:RSDDLTR(SEQ ID NO:830) F4:QKSNLSS(SEQ ID NO:831) F5:QSANRTT(SEQ ID NO:832) F6:QNATRTK(SEQ ID NO:833).

[0111] In any of the embodiments herein, the zinc finger protein comprises six zinc fingers denoted F1 through F6 in order from N-terminus to C-terminus, and wherein the amino acid sequence of each zinc finger recognition region is as follows: F1:QSSSLVR(SEQ ID NO:864) F2:QSGDLRR(SEQ ID NO:865) F3:RSDERKR(SEQ ID NO:866) F4:HRTTLTN(SEQ ID NO:867) F5:RSDHLTN(SEQ ID NO:868) F6:TSGELVR(SEQ ID NO:869).

[0112] Also provided herein is an eZFP that binds to a target site in one or more HBV genes or regulatory elements thereof, wherein the zinc finger protein comprises six zinc fingers denoted F1 through F6 in order from N-terminus to C-terminus, and wherein the amino acid sequence of each zinc finger recognition region is as follows: 1) F1:SEADRSR(SEQ ID NO:720) F2:DRSNLTR(SEQ ID NO:721) F3:QSSDLSR(SEQ ID NO:722) F4:YHWYLKK(SEQ ID NO:723) F5:RSDSLSV(SEQ ID NO:724) F6:QNANRKT(SEQ ID NO:725); 2) F1:RSDVLST(SEQ ID NO:726) F2:DNSSRTR(SEQ ID NO:727) F3:RPYTLRL(SEQ ID NO:728) F4:DSSHRTR(SEQ ID NO:729) F5:RSDHLSQ(SEQ ID NO:730) F6:DSSHRTR(SEQ ID NO:731); 3) F1:RSDHLSQ(SEQ ID NO:732) F2:QSADRTK(SEQ ID NO:733) F3:RSDHLSQ(SEQ ID NO:734) F4:RRSDLKR(SEQ ID NO:735) F5:RSDHLSR(SEQ ID NO:736) F6:QSSDLRR(SEQ ID NO:737); 4) F1:RSDNLSE(SEQ ID NO:738) F2:TSSNRKT(SEQ ID NO:739) F3:DRSHLTR(SEQ ID NO:740) F4:RSDALTQ(SEQ ID NO:741) F5:DRSALAR(SEQ ID NO:742) F6:RRFTLSK(SEQ ID NO:743); 5) F1:RSDHLSE(SEQ ID NO:744) F2:QYSGRYY(SEQ ID NO:745) F3:HGQTLNE(SEQ ID NO:746) F4:QSGNLAR(SEQ ID NO:747) F5:RSDSLLR(SEQ ID NO:748) F6:CREYRGK(SEQ ID NO:749); 6) F1:QSANRTT(SEQ ID NO:750) F2:RSANLTR(SEQ ID NO:751) F3:RSDVLSE(SEQ ID NO:752) F4:TSGHLSR(SEQ ID NO:753) F5:QSSDLSR(SEQ ID NO:754), F6:QWSTRKR(SEQ ID NO:755); 7) F1:QSGNLAR(SEQ ID NO:756) F2:ATCCLAH(SEQ ID NO:757) F3:RWQYLPT(SEQ ID NO:758) F4:DRSALAR(SEQ ID NO:759) F5:RSDNLSE(SEQ ID NO:760)F6:KRCNLRC(SEQ ID NO:761); 8) F1:NPANLTR(SEQ ID NO:762) F2:QNATRTK(SEQ ID NO:763) F3:QSGHLAR(SEQ ID NO:764) F4:NRHDRAK(SEQ ID NO:765) F5:RSDHLSE(SEQ ID NO:766), F6:QRRSRYK(SEQ ID NO:767); 9) F1:QSSDLSR(SEQ ID NO:768) F2:HRSTRNR(SEQ ID NO:769) F3:RSDVLSA(SEQ ID NO:770) F4:DSRTRKN(SEQ ID NO:771) F5:QSGSLTR(SEQ ID NO:772) F6:DQSGLAH(SEQ ID NO:773); 10) F1:QNPAQWR(SEQ ID NO:774) F2:RSADLSR(SEQ ID NO:775) F3:TSGSLSR(SEQ ID NO:776) F4:RSDHLSR(SEQ ID NO:777) F5:RSDSLLR(SEQ ID NO:778) F6:QSYDRFQ(SEQ ID NO:779); 11) F1:TSGSLSR(SEQ ID NO:780) F2:RSDHLSR(SEQ ID NO:781) F3:RSDSLLR(SEQ ID NO:782) F4:QSYDRFQ(SEQ ID NO:783) F5:RSDNLST(SEQ ID NO:784) F6:DNRDRIK(SEQ ID NO:785); 12) F1:DRSNLSR(SEQ ID NO:786) F2:LRQNLIM(SEQ ID NO:787) F3:ERGTLAR(SEQ ID NO:788) F4:RSDALTQ(SEQ ID NO:789) F5:RSDSLSQ(SEQ ID NO:790) F6:RKADRTR(SEQ ID NO:791); 13) F1:QYCCLTN(SEQ ID NO:792) F2:TSGNLTR(SEQ ID NO:793) F3:QSSDLSR(SEQ ID NO:794) F4:FRYYLKR(SEQ ID NO:795) F5:QSGDLTR(SEQ ID NO:796) F6:DKGNLTK(SEQ ID NO:797); 14) F1:TSGSLSR(SEQ ID NO:798) F2:RSDNLTT(SEQ ID NO:799) F3:QSGNLAR(SEQ ID NO:800) F4:DRTTLMR(SEQ ID NO:801) F5:QSGHLAR(SEQ ID NO:802) F6:QLTHLNS(SEQ ID NO:803); 15) F1:IKHDLHR(SEQ ID NO:804) F2:RSANLTR(SEQ ID NO:805) F3:RSDNLAR(SEQ ID NO:806) F4:QNVSRPR(SEQ ID NO:807) F5:RSDDLSK(SEQ ID NO:808) F6:DSSHRTR(SEQ ID NO:809); 16) F1:RSDNLAR(SEQ ID NO:810) F2:QNVSRPR(SEQ ID NO:811) F3:RSDDLSK(SEQ ID NO:812) F4:DSSHRTR(SEQ ID NO:813) F5:TSSNRKT(SEQ ID NO:814) F6:AQWTRAC(SEQ ID NO:815); 17) F1:RSDDLSK(SEQ ID NO:816) F2:DSSHRTR(SEQ ID NO:817) F3:TSSNRKT(SEQ ID NO:818) F4:AQWTRAC(SEQ ID NO:819) F5:RKQTRTT(SEQ ID NO:820) F6:HRSSLRR(SEQ ID NO:821); 18) F1:QSAHRKN(SEQ ID NO:822) F2:TSSNRKT(SEQ ID NO:823) F3:RSDNLSA(SEQ ID NO:824) F4:RNNDRKT(SEQ ID NO:825) F5:TSGSLSR(SEQ ID NO:826) F6:QAGHLAK(SEQ ID NO:827); 19) F1:RSDHLSQ(SEQ ID NO:828) F2:ASSTRTK(SEQ ID NO:829) F3:RSDDLTR(SEQ ID NO:830) F4:QKSNLSS(SEQ ID NO:831) F5:QSANRTT(SEQ ID NO:832) F6:QNATRTK(SEQ ID NO:833); 20) F1:RSDTLSE(SEQ ID NO:834) F2:RRWTLVG(SEQ ID NO:835) F3:DRSNLSR(SEQ ID NO:836) F4:QSGDLTR(SEQ ID NO:837) F5:QSSDLSR(SEQ ID NO:838) F6:YHWYLKK(SEQ ID NO:839); 21) F1:RSANLAR(SEQ ID NO:840) F2:RSDNLRE(SEQ ID NO:841) F3:RPYTLRL(SEQ ID NO:842) F4:HRSNLNK(SEQ ID NO:843) F5:QSGSLTR(SEQ ID NO:844) F6:TSANLSR(SEQ ID NO:845); 22) F1:RSDDLVR(SEQ ID NO:846) F2:TSGSLVR(SEQ ID NO:847) F3:RSDKLVR(SEQ ID NO:848) F4:RSDELVR(SEQ ID NO:849) F5:TSHSLTE(SEQ ID NO:850) F6:RADNLTE(SEQ ID NO:851); 23) F1:ERSHLRE(SEQ ID NO:852) F2:TSHSLTE(SEQ ID NO:853) F3:QAGHLAS(SEQ ID NO:854) F4:TSHSLTE(SEQ ID NO:855) F5:DPGHLVR(SEQ ID NO:856) F6:TSGNLVR(SEQ ID NO:857); 24) F1:RADNLTE(SEQ ID NO:858) F2:TSGSLVR(SEQ ID NO:859) F3:RKDNLKN(SEQ ID NO:860) F4:QSSSLVR(SEQ ID NO:861) F5:RSDKLVR(SEQ ID NO:862) F6:DSGNLRV(SEQ ID NO:863); 25) F1:QSSSLVR(SEQ ID NO:864) F2:QSGDLRR(SEQ ID NO:865) F3:RSDERKR(SEQ ID NO:866) F4:HRTTLTN(SEQ ID NO:867) F5:RSDHLTN(SEQ ID NO:868) F6:TSGELVR(SEQ ID NO:869); 26) F1:QSGDLRR(SEQ ID NO:870) F2:RSDERKR(SEQ ID NO:871) F3:HRTTLTN(SEQ ID NO:872) F4:RSDHLTN(SEQ ID NO:873) F5:TSGELVR(SEQ ID NO:874) F6:RSDDLVR(SEQ ID NO:875); 27) F1:QRAHLER(SEQ ID NO:876) F2:QLAHLRA(SEQ ID NO:877) F3:DPGHLVR(SEQ ID NO:878) F4:RRSACRR(SEQ ID NO:879) F5:RSDHLTT(SEQ ID NO:880) F6:QSSSLVR(SEQ ID NO:881); and 28) F1:QSSNLVR(SEQ ID NO:882) F2:RSDDLVR(SEQ ID NO:883) F3:THLDLIR(SEQ ID NO:884) F4:TSGNLTE(SEQ ID NO:885) F5:RRSACRR(SEQ ID NO:886) F6:RNDTLTE(SEQ ID NO:887).

[0113] In any of the embodiments herein, the engineered zinc finger protein comprises the sequence set forth in any one of SEQ ID NOS: 692-719, or a portion thereof, or an amino acid sequence that has at least 90%, 91%, 92%, 93%, 94%, 95%, 96%, 97%, 98%, or 99% sequence identity thereto. In any of the embodiments herein, the engineered zinc finger protein is encoded by the sequence set forth in any one of SEQ ID NOS:888-915, or a portion thereof, or nucleotide sequence that has at least 90%, 91%, 92%, 93%, 94%, 95%, 96%, 97%, 98%, or 99% sequence identity thereto.

[0114] Also provided herein is an engineered zinc finger protein that binds to a target site in one or more HBV genes or regulatory elements thereof, wherein the zinc finger protein comprises six zinc fingers denoted F1 through F6 in order from N-terminus to C-terminus, F1:QSAHRKN(SEQ ID NO:822) F2:TSSNRKT(SEQ ID NO:823) F3:RSDNLSA(SEQ ID NO:824) F4:RNNDRKT(SEQ ID NO:825) F5:TSGSLSR(SEQ ID NO:826) F6:QAGHLAK(SEQ ID NO:827). In some embodiments, the engineered zinc finger protein comprises the sequence set forth in SEQ ID NO: 709, or a portion thereof, or an amino acid sequence that has at least 90%, 91%, 92%, 93%, 94%, 95%, 96%, 97%, 98%, or 99% sequence identity thereto. In some embodiments, the engineered zinc finger protein comprises the sequence set forth in any one of SEQ ID NOS: 709. In some embodiments, the engineered zinc finger protein is encoded by the sequence set forth in SEQ ID NO:905, or a portion thereof, or nucleotide sequence that has at least 90%, 91%, 92%, 93%, 94%, 95%, 96%, 97%, 98%, or 99% sequence identity thereto. In some embodiments, the engineered zinc finger protein is encoded by the sequence set forth in any one of SEQ ID NOS:905.

[0115] Also provided herein is an engineered zinc finger protein that binds to a target site in one or more HBV genes or regulatory elements thereof, wherein the zinc finger protein comprises six zinc fingers denoted F1 through F6 in order from N-terminus to C-terminus, and wherein the amino acid sequence of each zinc finger recognition region is as follows: F1:RSDHLSQ(SEQ ID NO:828) F2:ASSTRTK(SEQ ID NO:829) F3:RSDDLTR(SEQ ID NO:830) F4:QKSNLSS(SEQ ID NO:831) F5:QSANRTT(SEQ ID NO:832) F6:QNATRTK(SEQ ID NO:833). In some embodiments, the engineered zinc finger protein comprises the sequence set forth in SEQ ID NO: 710, or a portion thereof, or an amino acid sequence that has at least 90%, 91%, 92%, 93%, 94%, 95%, 96%, 97%, 98%, or 99% sequence identity thereto. In some embodiments, the engineered zinc finger protein comprises the sequence set forth in any one of SEQ ID NOS: 710. In some embodiments, the engineered zinc finger protein is encoded by the sequence set forth in SEQ ID NO:906, or a portion thereof, or nucleotide sequence that has at least 90%, 91%, 92%, 93%, 94%, 95%, 96%, 97%, 98%, or 99% sequence identity thereto. In some embodiments, the engineered zinc finger protein is encoded by the sequence set forth in any one of SEQ ID NOS: 906.

[0116] Also provided herein is an engineered zinc finger protein that binds to a target site in one or more HBV genes or regulatory elements thereof, wherein the zinc finger protein comprises six zinc fingers denoted F1 through F6 in order from N-terminus to C-terminus, and wherein the amino acid sequence of each zinc finger recognition region is as follows: F1:QSSSLVR(SEQ ID NO:864) F2:QSGDLRR(SEQ ID NO:865) F3:RSDERKR(SEQ ID NO:866) F4:HRTTLTN(SEQ ID NO:867) F5:RSDHLTN(SEQ ID NO:868) F6:TSGELVR(SEQ ID NO:869). In some embodiments, the engineered zinc finger protein comprises the sequence set forth in SEQ ID NO: 716, or a portion thereof, or an amino acid sequence that has at least 90%, 91%, 92%, 93%, 94%, 95%, 96%, 97%, 98%, or 99% sequence identity thereto. In some embodiments, the engineered zinc finger protein comprises the sequence set forth in any one of SEQ ID NOS: 716. In some embodiments, the engineered zinc finger protein is encoded by the sequence set forth in SEQ ID NO:912, or a portion thereof, or nucleotide sequence that has at least 90%, 91%, 92%, 93%, 94%, 95%, 96%, 97%, 98%, or 99% sequence identity thereto. In some embodiments, the engineered zinc finger protein is encoded by the sequence set forth in any one of SEQ ID NOS:912.

### BRIEF DESCRIPTION OF THE DRAWINGS

[0117] FIG. 1 depicts the fold change in total HBV RNA mediated by each guide RNA and a dCas9-KRAB effector fusion protein. The fold change is depicted in relation to the median targeting position of each gRNA across all HBV genotypes.

[0118] FIG. 2 depicts the conservation of the guide RNAs across the HBV genome types (HBV0-HBV12).

[0119] FIG. 3A-FIG. 3B depicts repression of total HBV RNA (FIG. 3A) and HBsAg (FIG. 3B) mediated by the top gRNA candidates (HBVg_192 (SEQ ID NO: 582), HBVg_17 (SEQ ID NO: 407), HBVg_63 (SEQ ID NO: 453)) from the screen at day 5 post transfection.

[0120] FIG. 4 depicts the fold change in total HBV RNA mediated by each guide RNA and a DNMT3A/L-dCas9-KRAB-effector fusion protein. The fold change is depicted in relation to the median targeting position of each gRNA across the HBV genome.

[0121] FIG. 5 depicts repression of total HBV RNA mediated by the top gRNA candidates (HBVg_142 (SEQ ID NO: 532), HBVg_138 (SEQ ID NO: 528), HBVg_185 (SEQ ID NO: 575), HBVg_152 (SEQ ID NO: 542)) from the screen at days 41 and 61 post transfection.

[0122] FIG. 6A-FIG. 6B depicts durable and stable repression of total HBV RNA mediated by gRNAs HBVg_63 (SEQ ID NO: 453), HBVg_185 (SEQ ID NO: 575), and HBVg_56 (SEQ ID NO: 446).

[0123] FIG. 7 shows normalized total HBV RNA expression after redosing with combinations of exemplary gRNAs and epi-editor.

[0124] FIG. 8 depicts the fold change in 3.5 kilobase (kb) HBV RNA mediated by each guide RNA and a DNMT3A/L-dSpCas9-KRAB effector fusion protein in a true infection model. The fold change is depicted in relation to the median targeting position of each gRNA across the HBV genome.

[0125] FIG. 9 shows infection-to-infection consistency using a correlation plot between two cccDNA screens.

[0126] FIG. 10 shows gRNAs that either repressed integrated HBV, cccDNA, or both integrated and cccDNA.

[0127] FIG. 11 lists single gRNAs that targeted HBV cccDNA and integrated DNA and achieved multiplexed HBV repression at multiple genes and regulatory elements thereof.

[0128] FIG. 12 lists sequences targeted by single gRNAs that achieved multiplexed HBV repression at multiple genes and regulatory elements thereof.

[0129] FIG. 13 depicts the fold change in total HBV RNA mediated by each guide RNA and an exemplary epi-editor. The fold change is depicted in relation to the median targeting position of each gRNA across the HBV genome.

[0130] FIG. 14 shows repression of targeted HBV cccDNA transcripts by individual gRNAs.

[0131] FIG. 15A-FIG. 15B depicts repression of cccDNA in primary human hepatocyte (PHH) infection models. FIG. 15A shows repression mediated by HBVg_22 (SEQ ID NO: 412) of the HBV RNA from two PHH donors. FIG. 15B shows repression mediated by HBVg_22 (SEQ ID NO: 412) in PHH cells infected with two doses of HBV.

[0132] FIG. 16A-FIG. 16B show comparisons between repression mediated by HBVg_22 (SEQ ID NO: 412) in combination with either dSpCas9-KRAB alone (SEQ ID NO:595) or DNMT3A/L-dSpCas9-KRAB (“D3AL-K”; SEQ ID NO: 645) fusion in HepG2.NTCP (FIG. 16A) and PxB PHH (FIG. 16B) models.

[0133] FIG. 17 depicts multiplexed targeted transcriptional repression of different regions within the HBV RNA in Hep3B cells.

[0134] FIG. 18 shows repression mediated by either individual gRNAs or multiplexed gRNAs in PLC/PRF/5 (Alexander) cell models.

[0135] FIG. 19 shows a multiplexed approach with a combination of two gRNAs with an exemplary dSpCas9-effector in PXB primary human hepatocyte (PHH) cell models.

[0136] FIG. 20A and FIG. 20B show methyl capture sequencing analysis of cccDNA and integrated HBV DNA.

[0137] FIG. 21 shows increased methylation patterns following delivery of mRNA encoding DNMT3A/L-dSpCas9-KRAB along with various gRNA.

[0138] FIG. 22 shows durable CpG island 2 methylation patterns following delivery of mRNA encoding DNMT3A/L-dCas9-KRAB and HBVg_22 (SEQ ID NO: 412) to HBV-infected PHH donor.

[0139] FIG. 23A and FIG. 23B reveal RNA sequencing analysis of gRNA-dependent and epi-editor dependent changes on gene expression. FIG. 23C shows minimal changes in differentially expressed genes mediated by gRNAs compared to lipid only control. FIG. 23D shows no differentially expressed genes between non-targeting gRNA and HBVg_22 (SEQ ID NO: 412) at any dosage or timepoint.

[0140] FIG. 24 shows a schematic representation of an in vivo study in human chimeric liver mice.

[0141] FIG. 25 shows repression mediated by an exemplary DNMT3A/L-dCas9-KRAB fusion protein combined with the gRNA HBVg_22 (SEQ ID NO: 412) five days (D5) after administration. Repression was measured by monitoring HBsAg protein levels and HBV DNA 2 days prior (pre dose) and five days after lipid nanoparticle administration (D5).

[0142] FIG. 26 depicts the fold change in the post-dose to pre-dose metric.

[0143] FIG. 27A-FIG. 27D show repression in FRG mice after redosing with HBVg_22 (SEQ ID NO: 412) either alone or multiplexed with HBVg_185 (SEQ ID NO: 575), or when delivered by LNP conjugated with GalNAc, in combination with either an mRNA encoding a dCas9-KRAB (FIG. 27A-27C) or DNMT3A/L-dCas9-KRAB (FIG. 27D).

[0144] FIG. 28A-FIG. 28C show a human chimeric FRG mouse study following delivery by GalNAc conjugated PEG LNP. FIG. 28A shows stable repression following a single dose of LNP containing mRNA encoding DNMT3A/3L-dSpCas9-KRAB and HBVg_22 (SEQ ID NO: 412) on Day 33. FIG. 28B shows single mouse tracks of the degree of repression. FIG. 28C shows tissue samples with marked reductions in pgRNA signal in HBVg_22 (SEQ ID NO: 412)-delivered mice as compared to mice that received a non-targeting gRNA.

[0145] FIG. 29A-FIG. 29B depict the fold change in total HBV RNA mediated by each fusion protein comprising the KRAB epi-editor and a zinc finger protein (ZFP). The ZFP-KRAB fusion proteins were screened for HBV repression in Hep3B cells in two batches (FIG. 29A and FIG. 29B).

[0146] FIG. 30 shows a preliminary comparison between repression induced by ZFP-KRAB fusion proteins and dCas9-KRAB fusion protein in combination with gRNAs in Hep3B cells.

[0147] FIG. 31A-FIG. 31B show the targeting positions of each ZFP along the X-promoter (HBx) site. The highlighted region in FIG. 31A represents the region within the HBx promoter that is targeted by the most effective gRNAs (HBVg_22 and HBVg_63) as well as the most effective ZFP-KRAB fusion proteins (eZFP_18, eZFP_19, and eZFP_25). FIG. 31B depicts the sites in the HBx region targeted by the gRNAs HBVg_22 and HBVg_63 and the ZFP-KRAB fusion proteins eZFP_18, eZFP_19, and eZFP_25.

[0148] FIG. 32A-FIG. 32B depict the fold change in total HBV RNA mediated by each eZFP-KRAB fusion protein in HepG2.NTCP cells.

[0149] FIG. 33 shows the fold change in total HBV RNA mediated by each eZFP-KRAB fusion protein along with the conservation of the fusion protein across HBV subtypes.

[0150] FIG. 34 shows the fold change in total HBV RNA mediated by each DNMT3A/L-eZFP-KRAB fusion protein on day 4 and day 15 post-transfection.

[0151] FIG. 35 shows minimal changes in differentially expressed genes mediated by eZFP-KRAB fusion protein compared to lipid only control.

[0152] FIG. 36A-FIG. 36B reveal RNA sequencing analysis of eZFP-KRAB fusion protein-dependent changes on gene expression compared to either GFP (FIG. 36A) or a non-targeting (NT) control (FIG. 36B).

### DETAILED DESCRIPTION

[0153] Hepatitis B is a potentially life-threatening liver infection caused by the Hepatitis B virus (HBV). HBV infection is a global public health problem causing chronic liver infection and increasing the risk for liver cirrhosis and liver cancer. The WHO estimated that 296 million people worldwide with 1 million people in the U.S., were living with chronic hepatitis B infections in 2019, with 1.5 million new infections each year. In 2019, hepatitis B resulted in an estimated 820,000 deaths, mostly from cirrhosis and hepatocellular carcinoma (primary liver cancer).

[0154] HBV belongs to the Hepadnaviridae family, a family of small enveloped hepatotropic DNA viruses (Wei L. and Ploss A. Nature communications 12(1591) 1-13 (2021)). The HBV virion contains a compact, partially double-stranded, about 3.2 kb relaxed circular DNA (rcDNA) genome. The genome contains four lesions: a covalently linked HBV polymerase and a 10 nucleotide (nt) DNA flap on the 5′-end of the minus strand; and a 5′-capped RNA primer and single-stranded DNA (ssDNA) gap on the plus-strand. The HBV genome is an about 3.2 kilobase double-stranded DNA molecule, but can be longer or shorter depending on the particular HBV strain (e.g. up to 3300 bp or more in size). An exemplary HBV genome is the Hepatitis B Virus genome (Hepatitis B virus subtype ayw, complete genome, GenBank: U95551.1), SEQ ID NO: 650. At least 10 genotypes (A to J) have been identified with a divergence of no more than 8% between genotypes. Subgenotypes also exist including subgenotypes classified as HBV genotype A (A1-A7), genotype B (B1-B9), genotype C (C1-16), genotype D (D1-D8), and genotype F (F1-F4) (Zhang et al. World J Gastroenterol., 2015, 22:126-144). Within sub-genotypes the sequence identity divergence is only about 4%. It is understood that the provided systems and methods are applicable to a plurality of HBV genomes, particularly given the high sequence similarity. For purposes herein, reference to numbering of nucleotide positions is nucleotide (base pair) numbering of HBV DNA sequence described under GenBank accession no. U95551.1, set forth in SEQ ID NO:650. A skilled artisan understands that target site or base pair positions, such as described herein, in another HBV genome may not be at the identical position but nevertheless may be a homologous sequence or substantially homologous sequence (e.g. 1, 2 or 3 mismatches), such as determined by alignment of an HBV genome sequence with the sequence set forth in SEQ ID NO:650. A corresponding position or positions may thus be readily identified by alignment of an HBV genome sequence with the reference sequence set forth in SEQ ID NO:650. The Hepatitis B virus contains a circular genome and therefore for the purposes herein references to numbering of nucleotide positions of a linear HBV DNA sequence may shift by a few nucleotides, such as depending on the start of a linear sequence. For instance, the sequence set forth in SEQ ID NO:650 and SEQ ID NO: 1071 are the same sequence but the start of the linear sequences shifts by two nucleotides due to differences in the start of the linerar sequence. It is well within the level of a skilled artisan to identify corresponding sequence regions between and among different sequences of an HBV genome sequence.

[0155] The HBV lifecycle includes processes, such as viral entry, cccDNA formation, transcription, replication, assembly, secretion, and integration. Following viral entry into hepatocytes via the bile acid transporter NTCP11, the viral nucleocapsid harboring the HBV rcDNA is transported to the nucleus. The rcDNA is released, and the four lesions on the rcDNA are fully repaired to form a supercoiled cccDNA molecule (also called minichromosomes). The viral repair factors are dispensable for repair and the cccDNA often relies on host DNA repair machinery, including TDP2, DNA polymerase (POL) κ, POLα, DNA ligase 1 and 3, and flap endonuclease 1. The HBV hijacks host ubiquitous and liver-enriched transcription factors for cccDNA transcriptional regulation. The cccDNA is the key viral depot driving chronic HBV infection and serves as the template for all HBV viral transcripts. Another form of HBV DNA in the host is the stably integrated HBV DNA in the host genome (Zhao K., et al., Cell Press-The Innovation 1(2): 1-10 (2020). Double-stranded linear DNA (dslDNA) is the dominant substrate for integration into the host genome. As there is almost no sequence homology between the viral DNA and the cellular DNA, NHEJ DNA repair pathway is proposed as a mechanism for HBV DNA integration. HBV DNA integration occurs throughout the host genome at double stranded breaks, with terminal deletions up to 200 bp from the integrated HBV DNA being common. No specific chromosomal hot-spots or common recurring sites have been observed between patients. There is some evidence for enrichment in particular genomic sites in tumour tissues (Sung W., et al., Nature Genetics 44(7):765-9 (2012)). Although no progeny virus is produced, integrated HBV DNA can produce viral RNAs and proteins. HBV DNA integration occurs more often in hepatic cancer cells (84%) than in normal liver tissues (30%).

[0156] Current standard of care includes nucleoside analogs (e.g., lamivudine) and PEGlyated interferon therapies. Nucleoside analogs act by inhibiting HBV polymerase activity resulting in a decrease in viral replication. However, prolonged treatment periods, increase in viral resistance and emergence of mutant strains, have reduced the effectiveness of nucleoside therapies (Papatheodoridis G.V. et al., Am. J. Gastroenterol 97(7):1618-28 (2002). PEGlyated interferon therapy either alone or in combination with nucleoside analogs (e.g., lamivudine) has been tested to suppress transcription of viral DNA. PEGylated interferon therapy has been shown to mediate divergent effects on the innate and adaptive arms of the immune system, with strinkingly depleting effects on CD8 T cells, limiting the efficacy of the therapy (Micco L., et al., Journal of Hepatology 58(2): 225-233 (2013); Stelma F., et al., Journal f Infectious Disease 212(7):1042-51 (2015) marcellin P., et al., New England Journal of Medicine 351(12):1206-17 (2004)). Nucleotide analogs nor PEGylated therapies are able to clear or suppress production of HBV surface antigen (HBsAg), which has been linked to poor prognosis of HBV infection. Other therapies including antisense oligonucleotide (ASO) and siRNA approaches centered at reducing HBsAg to reach functional cures (Billioud G., et al., Journal of Hepatology 64(4):781-9 (2015); Gane E., et al., Hepatology 74(4):1795-1808 (2021); Flisiak R., et al., Expert Opinion on Biology Therapy 18(6)609-617) have shown to be promising in inhibiting HBsAg, HBeAg, and HBV DNA synthesis. However, the functional benefit of any of these therapies on the regeneration of liver tissue is unclear.

[0157] Current antiviral therapies rarely achieve a cure as they inhibit cytoplasmic HBV genome replication and do not directly target the cccDNA form—a form that serves as an HBV replication intermediate and viral persistence reservoir (Yang G., et al., Theranostics 9(24):7345-58 (2019)). Genome engineering approaches such as nucleases or base editors target removal or mutagenesis of the cccDNA pool in order to functionally cure the infection. However, such nuclease-based therapies have a chance of generating chromosomal abnormalities and therefore are not preferred, highlighting the need for better HBV therapeutics.

[0158] The persistence of the episomal cccDNA pool in infected hepatocytes remains a critical obstacle in complete elimination by anti-HBV therapies. The cccDNA accumulates in the nucleus as a chromatin-like cccDNA minichromosome assembled by histones and non-histones. The cccDNA shows unusual chromatin regulation due to its non-native status. For instance, changes the epigenetic states of the cccDNA have been found to dictate its transcriptional activity (Yang G., et al., Theranostics 9(24):7345-58 (2019). For example, the host nucleosome assembly machinery (HAT1/CAF-1) acetylates histone H4 at the sites of H4K5 and H4K12 contributing to the assembly of the cccDNA. The acetylation marks on the histones of the cccDNA in turn promote HBV replication and accumulation of the cccDNA. This transcriptional activity is largely driven by the presence of absence of activating epigenetic marks on the cccDNA; repressive histone marks (e.g., H3K27me3 and H3K9me3) are minute, suggesting that there is limited repression in the cccDNA (Tropberger P. et al., PNAS, 112(42):E5715-E5724 (2015), Riviere L., et al., J Hepatol 15(00450):S0168-8278 (2015)).

[0159] Desirable clinical outcomes have been associated with key epigenetic features within the cccDNA minichromosome. Studies have found that cccDNA contains methylation-prone CpG islands that are connected to the behavior of HBV (Zhang Y., et al., PlosOne 9(10):e110442 (2014), Vivekanandan P, et al., Journal of infectious diseases, 199(9):1286-1291 (2009), Vivekanandan P, et al., Journal of Virology, 84(9):4321-4329 (2010), Vivekanandan P. et al., Journal of Viral hepatitis 15(2):103-107 (2008), Jain S., et al., Scientific Reports 5: 10478 (2015)). Methylation of CpG islands II and II has been correlated to low levels of serum HBV DNA and HBsAg titres in patients (Zhang Y., et al., PlosOne 9(10):e110442 (2014)). HBV genotype, HBeAg positivity, patient age, and liver fibrosis stage have been found to correlate to cccDNA CpG methylation status. In vitro methylation studies have further confirmed that CpG island II methylation can markedly reduce cccDNA transcription and subsequent viral core DNA replication (Zhang Y., et al., PlosOne 9(10):e110442 (2014)), establishing the importance of chromatin for cccDNA regulation and as a potential target for therapy of chronic HBV infections. Anti-virals and broad epigenetic-modifying agents, such as IFNα have been attributed to reducing active histone post translational modifications thereby transcriptionally down-regulating transcription of cccDNA (Tropberger P. et al., PNAS, 112(42):E5715-E5724 (2015), Belloni L, et al., Journal of Clinical investigation 122L529-537 (2012), Allweiss L., et al., Journal of Hepatology 60:500-507 (2014), Lucifora J., et al., Science 343: 1221-1228 (2014)).

[0160] The provided embodiments are based on a recognition that epigenetically silencing one or more HBV viral genes, including those present on the cccDNA, might be a viable therapeutic approach to curing HBV infections. Disclosed herein are approaches to achieve amelioration of infection, and in some cases potentially a functional cure, from HBV via precise epigenetic silencing of the cccDNA form, relaxed circular DNA (rcDNA) form and of the HBV integrated into the human genomic DNA. The approaches described herein demonstrate high efficacy, safety, and stability. In some embodiments, the approaches target all the forms of HBV in the same approach, utilize non-mutagenic platforms, and targeting the source of transcription rather than downstream transcripts. As methylation can be inherited by the cellular progeny, the durability of the epi-editing approaches offers promise for treatment of HBV infection. In some embodiments, the approaches described herein target multiple locations on the virus genome to ensure deep and durable response across HBV variants. In some embodiments, the epigenetic approaches result in silencing of HBV replication, HBV transcription, and production of proteins form the HBV DNA. The provided embodiments are not contingent on immune reboot nor on infected hepatocyte clearance but are based on a direct epigenetic silencing (e.g., HBV repression).

[0161] Among provided embodiments herein is an epigenetic-modifying DNA-targeting system comprising at least one DNA-targeting module for repressing transcription of one or more Hepatitis B viral (HBV) genes and/or regulatory elements thereof; wherein each of the at least one DNA-targeting module comprises a fusion protein comprising: (a) a DNA-binding domain for targeting to a target site in a Hepatitis B viral DNA sequence; and (b) at least one transcriptional repressor effector domain. In some embodiments, the provided epigenetic-modifying DNA-targeting systems are for multiplexed targeted repression of a plurality of different genes or regulatory elements thereof that regulate Hepatitis B viral (HBV) replication and/or HBV transcription. In some embodiments, the epigenetic-modifying DNA-targeting system comprises a plurality of DNA-targeting modules for repressing transcription of a plurality of genes or regulatory elements thereof that regulate Hepatitis B viral (HBV) replication and/or HBV transcription. In some embodiments, the DNA-targeting module comprises (a) a fusion protein comprising a Clustered Regularly Interspaced Short Palindromic Repeats associated (Cas) protein or variant thereof and at least one transcriptional repressor effector domain; and (b) a plurality of guide RNAs (gRNAs) comprising at least a first gRNA and a second gRNA. In some embodiments, the first gRNA targets a target site of a first gene or regulatory element thereof and the second gRNA targets a target site of a second gene or regulatory element thereof. The first and second genes or regulatory elements thereof regulate Hepatitis B virus replication and/or HBV transcription. Also provided herein are polynucleotides encoding the DNA-targeting systems or fusion proteins of the DNA-targeting systems, vectors, and compositions containing the same.

[0162] In some embodiments of the provided epigenetic-modifying DNA-targeting system, the DNA binding domain is a nuclease-inactive Clustered Regularly Interspaced Short Palindromic Repeats associated (Cas) protein or variant thereof, such as a dead Cas (dCas, e.g. dCas9), and the DNA-targeting system further includes at least one gRNA that can complex with the Cas. In some embodiments, the DNA-binding domain is a nuclease-inactive Clustered Regularly Interspaced Short Palindromic Repeats associated (Cas) protein or variant thereof complexed with a guide RNA (gRNA). In such systems, the gRNA has a spacer sequence that is capable of hybridizing to the target site of the gene or regulatory element thereof. Also provided herein are related gRNAs, including Cas/gRNA combinations, polynucleotides, compositions, and methods involving or related to the epigenetic-modifying DNA targeting systems.

[0163] In some embodiments of the provided epigenetic-modifying DNA-targeting system, the DNA-binding domain is a protein domain that is engineered for sequence-specific binding to the target site. For example, in some embodiments, the DNA-binding domain is a zinc-finger (ZFN)-based DNA-binding domain, or transcription activator-like effector DNA-binding domain, as described herein.

[0164] Also provided herein are methods of using the epigenetic-modifying DNA-targeting system for modulating transcription or a phenotype of liver cells. Also provided herein are methods of using the epigenetic-modifying DNA-targeting systems for repressing HBV replication and/or protein levels. In some embodiments, the methods can be used in therapies for treating HBV infections, such as hepatitis.

[0165] In some embodiments, the target site is present in a covalently closed circular DNA (cccDNA), relaxed circular DNA (rcDNA) and/or is integrated in the genomic DNA. In some embodiments, the target site is at or near a gene or regulatory element thereof involved in HBV replication and/or HBV transcription, such as a regulatory element or a coding region. Also provided herein are epigenetic-modifying DNA-targeting systems that are multiplexed with a plurality of DNA-targeting modules such that the system is able to target a combination of such genes or regulatory elements thereof. In some embodiments, each module of the DNA-targeting system represses transcription of a different gene. Also provided herein are methods of using the epigenetic-modifying DNA-targeting systems for reducing the HBV replication and/or transcription. In some embodiments, the methods can be used in treating liver disease (e.g., hepatitis), cancer (e.g., hepatocellular carcinoma), or HBV infection (acute or chronic hepatitis).

[0166] Hence, in some embodiments, the DNA-targeting systems comprise synthetic transcription factors that are able to modulate, such as reduce or repress, transcription of a gene in a targeted manner. In provided embodiments, the provided epigenetic-modifying DNA-targeting system reduces transcription of the gene and/or regulatory element thereof or plurality of genes and/or regulatory element thereof, and thereby promotes silencing of HBV replication and/or transcription. The provided embodiments can be used to target multiple genetic mechanisms to treat HBV in infected patients, while avoiding the viral resistance, cost related to prolonged treatments, and poor efficacies of current combination therapies. This approach offers substantial clinical solutions to the treatment of HBV infections by reducing viral replication as well as transcription from both cccDNA and integrated HBV DNA, and circumventing the problems associated with current therapies.

[0167] All publications, including patent documents, scientific articles and databases, referred to in this application are incorporated by reference in their entirety for all purposes to the same extent as if each individual publication were individually incorporated by reference. If a definition set forth herein is contrary to or otherwise inconsistent with a definition set forth in the patents, applications, published applications and other publications that are herein incorporated by reference, the definition set forth herein prevails over the definition that is incorporated herein by reference.

[0168] The section headings used herein are for organizational purposes only and are not to be construed as limiting the subject matter described.

### I. DNA-TARGETING SYSTEMS

[0169] In some embodiments, provided are DNA-targeting systems capable of specifically targeting a target site in at least one gene (also called a target gene herein) or DNA regulatory element thereof (e.g., regulatory element), and reducing transcription of the at least one gene. In provided embodiments, for each target gene or regulatory element thereof that is targeted, the DNA-targeting systems include a DNA-binding domain that binds to a target site in a gene or regulatory element thereof. In some embodiments, the DNA-targeting systems additionally include at least one effector domain that is able to epigenetically modify one or more DNA bases of the gene or regulatory element thereof, in which the epigenetic modification results in a reduction in transcription of the gene (e.g. inhibits transcription or reduces transcription of the gene compared to the absence of the DNA-targeting system). Hence, the terms DNA-targeting system and epigenetic-modifying DNA targeting system may be used herein interchangeably. In some embodiments, the DNA-targeting systems include a fusion protein comprising (a) at least one DNA-binding domain capable of being targeted to the target site; and (b) at least one effector domain capable of reducing transcription of the gene. For instance, the at least one effector domain is a transcription repressor domain.

[0170] In some embodiments, the DNA-targeting system contains at least one DNA-targeting module, where each DNA-targeting module of the system is a component of the DNA-targeting system that is independently capable of targeting one target site in a target gene or regulatory element thereof as provided. In some embodiments, each DNA-targeting module includes (a) a DNA-binding domain capable of being targeted to a target site of the target gene or regulatory element thereof that regulates HBV replication and/or HBV transcription and (b) an effector domain capable of reducing transcription of the gene.

[0171] In some embodiments, the DNA-targeting system includes a single DNA-targeting module for targeting repression of a single gene. In some embodiments, the DNA-targeting module includes (a) a DNA-binding domain capable of being targeted to a target site of the target gene or regulatory element thereof that regulates HBV replication and/or HBV transcription and (b) an effector domain capable of reducing transcription of the gene.

[0172] In some embodiments, the DNA-targeting system includes a single DNA-targeting module for targeting repression of more than one gene or regulatory element thereof. Hence, in some embodiments, the single DNA-targeting module provides for a multiplexed epigenetic-modifying DNA targeting system that targets for modulation (e.g. repression) more than one gene or regulatory element thereof. In some embodiments, the DNA-targeting module includes (a) a DNA-binding domain capable of being targeted to a target site of more than one target gene or regulatory element thereof that regulates HBV replication and/or HBV transcription and (b) an effector domain capable of reducing transcription of the gene. In some embodiments, the DNA-targeting system includes a single DNA-targeting module for targeting repression of at least 2, at least 3, at least 4, at least 5, at least 6, at least 7, at least 8, at least 9, at least 10, at least 20, at least 30 genes or regulatory elements thereof. In particular embodiments, the DNA-targeting module is cross-reactive to each of the target sites of the more than one gene. In some embodiments, the single DNA-targeting module provides a multiplexed epigenetic-modifying DNA targeting system that represses transcription of more than one gene or regulatory element thereof. In some embodiments, the DNA-targeting module represses transcription of at least 2, at least 3, at least 4, at least 5, at least 6, at least 7, at least 8, at least 9, at least 10, at least 20, at least 30 genes or regulatory elements thereof.

[0173] In some embodiments, the DNA-targeting systems are multiplexed DNA-targeting systems that include a plurality of DNA-targeting modules, in which each DNA-targeting module targets a different target site of one or more genes or regulatory elements thereof. In some embodiments, the different targets sites are in the same region of the gene or regulatory element thereof. In some embodiments, the different target sites are present in a regulatory element, such as a promoter. In some embodiments, the target sites overlap, such that any two or more DNA-targeting modules bind to overlapping target sites.

[0174] In some embodiments, the DNA-targeting system includes a plurality of DNA-targeting modules, in which each DNA-targeting module is for targeting repression of a different gene. In some embodiments, the DNA-targeting systems are multiplexed DNA-targeting systems, i.e. targeted to target sites in more than one gene or regulatory element thereof. The term DNA-targeting system may include a multiplexed epigenetic-modifying DNA targeting system that includes more than one DNA-targeting module. In some embodiments, each DNA-targeting module within the multiplexed epigenetic-modifying DNA targeting system targets a target site in a different gene or regulatory element thereof to each repress a different gene, from other DNA-targeting modules of the system. In some embodiments, each DNA-targeting module within the multiplexed epigenetic-modifying DNA targeting system targets a target site in more than one gene or regulatory element thereof to repress transcription of the more than one gene. In some embodiments, each DNA-targeting module represses transcription of at least 2, at least 3, at least 4, at least 5, at least 6, at least 7, at least 8, at least 9, at least 10, at least 20, at least 30 genes.

[0175] A multiplexed epigenetic-modifying DNA targeting system comprises at least 2, at least 3, at least 4, at least 5, at least 6, at least 7, at least 8, at least 9, at least 10, at least 20, at least 30 DNA-targeting modules or any value between any of the foregoing. In some embodiments, the multiplexed epigenetic-modifying DNA targeting system represses transcription of at least 2, at least 3, at least 4, at least 5, at least 6, at least 7, at least 8, at least 9, at least 10, at least 20, at least 30 genes.

[0176] In some embodiments, any two DNA-targeting modules of a DNA-targeting system comprise separate (i.e. non-overlapping) components. In some embodiments, each DNA-targeting modules of a DNA-targeting system comprise separate (i.e. non-overlapping) components. For example, a DNA-targeting system may comprise a first DNA-targeting module comprising a first fusion protein comprising a DNA-binding domain (e.g. a ZFN or TALE-based DNA-binding domain) that targets a first target site, and a second DNA-targeting module comprising a second fusion protein comprising a second DNA-binding domain (e.g. a ZFN or TALE-based DNA-binding domain) that targets a second target site.

[0177] In some embodiments, any two DNA-targeting modules of a DNA-targeting system may comprise shared (i.e. overlapping) components. In some embodiments, each DNA-targeting modules of a DNA-targeting system comprise shared (i.e. overlapping) components. For example, a DNA-targeting system may comprise a first DNA-targeting module comprising (a) a fusion protein comprising a Cas protein and a transcriptional repressor domain, and (b) a first gRNA that complexes with the Cas protein and targets a first target site of a first HBV gene or regulatory element thereof, and a second DNA-targeting module comprising (a) the fusion protein of the first DNA-targeting module, and (b) a second gRNA that complexes with the Cas protein and targets a second target site of a second HBV gene or regulatory element thereof. It will be understood that providing two or more different gRNAs for a given Cas protein allows different molecules of the same Cas protein to be targeted to the target sites of the two or more gRNAs. Conversely, different Cas protein variants (e.g., SpCas9 and SaCas9) are compatible with different gRNA scaffold sequences and PAMs, as described herein. Thus, it is possible to engineer a single DNA-targeting system comprising multiple non-overlapping CRISPR/Cas-based DNA-targeting modules.

[0178] In some aspects, provided herein is an epigenetic-modifying DNA-targeting system comprising a plurality of DNA-targeting modules for repressing transcription of a plurality of genes that regulate HBV replication and/or HBV transcription. In some embodiments, the plurality of DNA-targeting modules comprises a first DNA-targeting module for repressing transcription of a first gene of the plurality of genes or regulatory elements thereof, and a second DNA-targeting module for repressing transcription of a second gene of the plurality of genes. In some embodiments, each DNA-targeting module comprises a fusion protein comprising: (a) a DNA-binding domain for targeting to a target site of one of the plurality of genes, and (b) at least one transcriptional repressor domain. In some embodiments, the target site is at or near an HBV gene or a regulatory element thereof. In some embodiments, HBV gene or a regulatory element thereof is involved in controlling HBV replication and/or HBV transcription. The regulatory element may be a promoter region (e.g., pre-S1 promoter, a pre-S2 promoter, X promoter, or basal core promoter), enhancer region (e.g., Enh1 or an Enh2 enhancer region), or any other transcript processing control region (e.g., regions involved in 5′-capping, splicing, and/or 3′ polyadenylation).

[0179] In some aspects, provided herein is an epigenetic-modifying DNA-targeting system comprising at least one DNA-targeting module for repressing transcription of one or more Hepatitis B viral (HBV) genes; wherein each of the at least one DNA-targeting module comprises a fusion protein comprising: (a) a DNA-binding domain for targeting to a target site in a Hepatitis B viral DNA sequence, such as an HBV gene or regulatory element thereof; and (b) at least one transcriptional repressor effector domain.

[0180] In some aspects, provided herein is an epigenetic-modifying DNA-targeting system comprising at least one DNA-targeting module for repressing transcription of one or more Hepatitis B viral (HBV) genes, wherein each of the at least one DNA-targeting module comprises: (a) a fusion protein comprising a Clustered Regularly Interspaced Short Palindromic Repeats associated (Cas) protein or variant thereof and at least one transcriptional repressor effector domain; and (b) a plurality of guide RNAs (gRNAs) targeting a plurality of target sites of a plurality of genes or regulatory elements thereof, wherein the plurality of genes or regulatory elements thereof regulate Hepatitis B virus replication and/or HBV transcription. In aspects of the provided embodiments, the plurality of target sites are 2, 3, 4, 5, or 6 different target sites. In aspects of the provided embodiments, the plurality of target sites are each in a different HBV gene or a regulatory element thereof.

[0181] In aspects of the provided embodiments, a DNA-targeting system provided herein targets a gene or regulatory element thereof to reduce transcription of one or more HBV genes in an Hepatitis B Virus (HBV) infected cell, in which the reduced transcription modulates one or more activities or functions of the HBV infected cells, such as expression of HBV RNA and/or HBV proteins. In some embodiments, reduced transcription of the gene results in a reduction in expression of the gene, i.e. reduced gene expression, in the infected cell. In some embodiments, reduced transcription of the gene, such as reduced gene expression, results in a reduction in expression of the protein, i.e. reduced protein expression, in the infected cell.

[0182] In some aspects, the cell is a liver cell, such as a hepatocyte, hepatic stellate cells (HSCs), kupffer cells, and liver sinusoidal endothelial cells. For instance, provided herein is a DNA-targeting system provided herein targets a gene or a regulatory element thereof to reduce transcription of the HBV gene in a target cell, in which the reduced transcription modulates one or more activities or functions of HBV, such as transcription and protein expression of HBV. In some embodiments, reduced transcription of the gene results in a reduction in expression of the gene, i.e. reduced gene expression, in the target cell. In some aspects the cell is a liver cell.

[0183] In some aspects, the cell is from a human subject. In some aspects the cell is a cell in a subject (i.e. a cell in vivo).

[0184] In some embodiments, the DNA-binding domain comprises or is derived from a CRISPR associated (Cas) protein, zinc finger protein (ZFP), transcription activator-like effectors (TALE), meganuclease, homing endonuclease, I-SceI enzyme, or variants thereof. In some embodiments, the DNA-binding domain comprises a catalytically inactive (e.g. nuclease-inactive or nuclease-inactivated) variant of any of the foregoing. In some embodiments, the DNA-binding domain comprises a deactivated Cas9 (dCas9) protein or variant thereof that is a catalytically inactivated so that it is inactive for nuclease activity and is not able to cleave the DNA.

[0185] In some embodiments, the DNA-binding domain comprises or is derived from a Cas protein or variant thereof such as a nuclease-inactive Cas or dCas (e.g. dCas9, and the DNA-targeting system comprises one or more guide RNAs (gRNAs), such as a combination of gRNAs (e.g. two gRNAs or three gRNAs). In some embodiments, the gRNA comprises a spacer sequence that is capable of targeting and/or hybridizing to the target site. In some embodiments, the gRNA is capable of complexing with the Cas protein or variant thereof. In some aspects, the gRNA directs or recruits the Cas protein or variant thereof to the target site. In some embodiments, the effector domain comprises a transcription repressor domain, and/or is capable of reducing transcription of the gene. In some embodiments, the effector domain directly or indirectly leads to reduced transcription of the gene. In some embodiments, the effector domain induces, catalyzes or leads to transcription repression. In some embodiments, the effector domain induces transcription repression. In some aspects, the effector domain is selected from a KRAB domain, ERF repressor domain, MXI1 domain, SID4X domain, MAD-SID domain, a DNMT family protein domain (e.g. DNMT3A or DNMT3B), a fusion of one or more DNMT family proteins or domains thereof (e.g. DNMT3A/L, which comprises a fusion of DNMT3A and DNMT3L domains), LSD1, a SunTag domain, an EZH2 domain, a partially or fully functional fragment or domain of any of the foregoing, or a combination of any of the foregoing. In some embodiments, the effector domain is KRAB. In some embodiments, the effector domain is DNMT3A/L.

[0186] In some embodiments, the fusion protein of the DNA-targeting system comprises a dCas9-KRAB fusion protein. In some embodiments, the fusion protein of the DNA-targeting system comprises a DNMT3A/L-dCas9-KRAB-fusion protein. In some embodiments, the fusion protein of the DNA-targeting system comprises a KRAB-dCas9-DNMT3A/L-fusion protein.

[0187] Exemplary components and features of the DNA-targeting systems are provided below in the following subsections.

[0188] A. Target Sites and Target Positions

[0189] In any of the embodiments herein, the target site is a gene and/or regulatory element thereof in the Hepatitis B viral (HBV) genome. In some embodiments, the target site is present in a covalently closed circular DNA (cccDNA), relaxed circular DNA (rcDNA) and/or is integrated in the human genomic DNA. In some embodiments, the target site in a Hepatitis B viral DNA sequence. In some embodiments, the Hepatitis B viral DNA sequence is an HBV gene or a regulatory element thereof. In some embodiments, the target site is at or near a gene involved in HBV replication and/or HBV transcription. In some embodiments, the epigenetic-modifying DNA-targeting system comprises at least one DNA-targeting module for repressing transcription of one or more HBV by targeting to the target site. In some aspects, repressing transcription of the HBV gene, such as reduced gene expression, results in silencing of HBV replication (e.g., reduced HBV replication) and/or HBV transcription.

[0190] With reference to the provided disclosure, it is understood that a cell that is positive (+) for HBV (e.g., HBV infected cell) means that the cell expresses any of the HBV markers (e.g., HBV RNA transcripts and/or proteins) described herein. Likewise, it is understood that a cell that is negative (−) for a particular marker is a cell that does not express the marker at a level that is not detectable. Antibodies and other binding entities can be used to detect expression levels of marker proteins to identify or detect a given cell surface marker. Suitable antibodies may include polyclonal, monoclonal, fragments (such as Fab fragments), single chain antibodies and other forms of specific binding molecules. Antibody reagents for cell surface markers above are readily known to a skilled artisan. A number of well-known methods for assessing expression level of surface markers or proteins may be used, such as detection by affinity-based methods, e.g., immunoaffinity-based methods, e.g., in the context of surface markers, such as by flow cytometry. In some embodiments, the label is a fluorophore and the method for detection or identification of cell surface markers on cells (e.g. hepatocytes) is by flow cytometry. In some embodiments, different labels are used for each of the different markers by multicolor flow cytometry. In some embodiments, surface expression can be determined by flow cytometry, for example, by staining with an antibody that specifically binds to the marker and detecting the binding of the antibody to the marker.

[0191] In some embodiments, a cell (e.g. hepatocyte) is positive (pos or +) for a particular marker if there is detectable presence on or in the cell of a particular marker, which can be an intracellular marker or a surface marker (e.g., HBeAg, HBsAg). In some embodiments, surface expression is positive if staining by flow cytometry is detectable at a level substantially above the staining detected carrying out the same procedures with an isotype-matched control under otherwise identical conditions and/or at a level substantially similar to, or in some cases higher than, a cell known to be positive for the marker and/or at a level higher than that for a cell known to be negative for the marker. In some embodiments, a cell (e.g. a hepatocyte) contacted by a DNA-targeting system described herein, has decreased expression for a particular marker (e.g. HBeAg) if the staining is substantially lower than a similar cell that was not contacted by the DNA-targeting system.

[0192] In some embodiments, a cell (e.g. hepatocyte) is negative (neg or −) for a particular marker if there is an absence of detectable presence on or in the cell of a particular marker, which can be an intracellular marker or a surface marker. In some embodiments, surface expression is negative if staining is not detectable by flow cytometry at a level substantially above the staining detected carrying out the same procedures with an isotype-matched control under otherwise identical conditions and/or at a level substantially lower than a cell known to be positive for the marker and/or at a level substantially similar to a cell known to be negative for the marker.

[0193] In some embodiments, the phenotype of infected cells and/or individuals is characterized functionally. In some aspects, the phenotype can be characterized by the presence of HBV RNA transcripts in infected cells. In some aspects, the phenotype can be characterized by the presence of any one or combination of the HBV proteins in infected cells. In some aspects, the phenotype can be characterized by the presence of antibodies to any of the markers described herein. In some aspects, the antibodies include but are not limited to anti-HBc-IgM, anti-HBc total, and antibodies to HBeAg. In some embodiments, the RNA transcripts, proteins and/or antibodies are measured, detected, and/or quantified by any suitable technique known in the art. For instance, the RNA transcripts may be measured, detected and/or quantified using real-time PCR techniques. The HBV proteins (e.g., HBsAg, HBeAg and/or HBcrAg) may be measured, detected and/or quantified using enzyme-linked immunosorbent assays (ELISAs).

[0194] The target genes and/or regulatory elements thereof for modulation by the provided DNA-targeting systems, including multiplexed epigenetic-modifying DNA-targeting systems herein, include any whose transcription and expression are reduced in cells (e.g., HBV infected cells). Various methods may be utilized to characterize the transcription or expression levels of a gene in a cell (e.g. hepatocyte) such as after the cell has been contacted or introduced with a provided DNA-targeting system. In some embodiments, analyzing the transcription activity or expression of a gene may be by RNA analysis. In some embodiments, the RNA analysis includes RNA quantification. In some embodiments, the RNA quantification occurs by reverse transcription quantitative PCR (RT-qPCR), multiplexed qRT-PCR, fluorescence in situ hybridization (FISH), RNA-sequencing (RNA-seq) or combinations thereof.

[0195] In some embodiments, the gene or transcript is one in which expression of the gene or presence of the transcript in the cell (e.g. HBV infected cell, such as a hepatocyte), is reduced after having been contacted or introduced with a provided DNA-targeting system, such as a multiplexed epigenetic DNA-targeting system. In some aspects, a plurality of genes or transcripts are targeted by a multiplexed epigenetic DNA-targeting system, such as by one or more DNA-targeting modules thereof. In such system, each gene or transcript of a multiplexed DNA-targeting system is one in which expression of the gene or presence of the transcript in the cell is reduced after having been contacted or introduced with a provided multiplexed epigenetic DNA targeting system. In some embodiments, the reduction in gene expression or the change in the level of transcripts in a cell (e.g. HBV infected cell, such as a hepatocyte) is about a log 2 fold change of at least 1.25-fold, 1.5-fold, 1.75-fold, 2.0-fold, 2.5-fold, 2.75-fold, 3.0-fold, 3.25-fold, 3.5-fold, 3.75-fold, 4.0 fold, 4.25-fold, 4.5-fold, 4.75-fold, 5.0-fold, 5.25-fold, 5.5-fold, 5.75-fold, 6.25-fold, 6.50-fold, 6.75-fold, 7.0-fold. 7.25-fold, 7.50-fold, 7.75-fold, 8.0-fold, 8.25-fold, 8.5-fold, 8.75-fold, 9.0-fold or any value between any of the foregoing compared to the level of the gene in a control cell. In some embodiments, the reduction in gene expression or the change in the level of transcripts in a cell (e.g. HBV infected cell, such as a hepatocyte) is about 10%, about 20%, about 30%, about 40%, about 50%, about 60%, about 70%, about 80%, about 90%, about 100% or any value between any of the foregoing compared to the level of gene in a control cell. In some embodiments, the reduction in gene expression or the change in the level of transcripts in a cell is greater than 90% compared to the level of gene in a control cell. In some embodiments, the guide RNAs are set forth in SEQ ID NOs:565, 528, 542, 508, 515, 575, 515, 453, 506, 514, 425, or 472. In some embodiments, the reduction in gene expression or the change in the level of transcripts in a cell is greater than 75% compared to the level of gene in a control cell. In some embodiments, the guide RNAs are set forth in SEQ ID NOS: 565 (HBVg_175), 528 (HBVg_138), 582 (HBVg_192), 542 (HBVg_152), 508 (HBVg_118), 515 (HBVg_125), 575 (HBVg_185), 453 (HBVg_63), 506 (HBVg_116), 514 (HBVg_124), 395 (HBVg_5), 472 (HBVg_82), 451 (HBVg_61), 488 (HBVg_98), 540 (HBVg_150), 533 (HBVg_143), 572 (HBVg_182), 566 (HBVg_176), 489 (HBVg_99), 469 (HBVg_79), 408 (HBVg_18), 465 (HBVg_75), 402 (HBVg_12), 474 (HBVg_84), 525 (HBVg_135), 416 (HBVg_26), 396 (HBVg_6), 554 (HBVg_164), 419 (HBVg_29), 545 (HBVg_155), 446 (HBVg_56), 580 (HBVg_190), 555 (HBVg_165), 412 (HBVg_22), 428 (HBVg_38), 458 (HBVg_68), 548 (HBVg_158), 511 (HBVg_121), 432 (HBVg_42), 441 (HBVg_51), 433 (HBVg_43), 579 (HBVg_189), 479 (HBVg_89), 478 (HBVg_88), 520 (HBVg_130), 462 (HBVg_72), 523 (HBVg_133), and 503 (HBVg_113).

[0196] In provided embodiments, the cccDNA transcribes five HBV RNAs (0.7 kb, 2.1 kb, 2.4 kb, longer and shorter 3.5 kb RNAs) under the host RNA polymerase. Transcription of cccDNA is controlled by four promoters—the basal core, preS1, preS2, and X promoters and two enhancers—enhancers I and II (FIG. 1). The 0.7-kb RNA can be translated to HBV X protein (HBx) which acts as a transcriptional regulator. The 2.1-kb RNA can be translated to HBV small surface protein (S) and middle surface protein (M). The 2.4-kb RNA can be translated to HBV large surface protein (L). L, M, and S can self-assemble to form empty subviral particles (SVPs) (including spherical SVPs and filamentous SVPs) that are secreted with only filamentous SVPs and virions containing significant amounts of L protein. The spherical SVPs are secreted through the constitutive secretory pathway. The filamentous SVPs are secreted by the endosomal sorting complex required for transport (ESCRT) machinery through multivesicular bodies (MVB). The longer 3.5-kb RNA is termed pre-core RNA (preC RNA) and can be translated to pre-Core protein, better known as HBV e antigen (HBeAg). The shorter 3.5-kb RNA is pre-genomic RNA (pgRNA) that has two roles, as the translation template for HBV polymerase (Pol) and Core proteins and as the replication template for intra-capsid (formed by Core protein polymerization) reverse transcription by Pol to form HBV rcDNA. These nucleocapsids can then be enveloped by HBV surface proteins (L, M, and S) to form mature virions and secreted through the ESCRT/MVB pathway. Alternatively, these nucleocapsids can also be transported to the nucleus to form cccDNA. In some embodiments, repressing transcription and/or translation of the HBV gene, such as reduced gene expression, results in silencing of any of the following HBV markers: HBV HBV X protein (HBx), Hepatitis B surface antigens (HBsAg) such as small surface protein (S), middle surface protein (M), or HBV large surface protein (L), HBV e antigen (HBeAg). In some embodiments, repressing transcription and/or translation of the HBV gene, such as reduced gene expression, results in silencing of HB core-related antigens (HBcrAg). HBcrAg includes 3 precore/core protein products, including hepatitis B core antigen (HBcAg), HBeAg, and a 22-kDA precore protein (p22cr). In some aspects, cccDNA, HBV total DNA, serum HBcrAg, HBsAg, HBeAg, hepatitis B core antibody (anti-HBc), HBV DNA, HBV RNA are quantified as readouts for measuring reduced HBV transcription and/or translation. In some embodiments, the target site is in a gene that encodes any of the HBV proteins. In some embodiments, the target site is in a regulatory element (e.g. promoter or enhancer) of a gene that encodes any of the HBV proteins.

[0197] In some embodiments, the target site for an epigenetic-modifying DNA-targeting system is in a gene involved in HBV replication and/or HBV transcription. In some aspects, the target site for an epigenetic-modifying DNA-targeting system is in or near a gene or a regulatory element thereof involved in controlling HBV replication and/or HBV transcription. In some embodiments, the gene involved in HBV replication and/or HBV transcription is a polymerase gene, a S-family gene, a X-gene, and/or a core-family gene. In some embodiments, the gene involved in HBV replication and/or transcription encodes a polymerase, an envelope protein, capsid protein, transcription factor, or transcriptional transactivator. In some embodiments, the regulatory element thereof involved in HBV replication and/or HBV transcription is a promoter region, an enhancer region, and/or any transcript processing control region. In some embodiments, the promoter region is a pre-S1 promoter, a pre-a S2 promoter, a X promoter, or a basal core promoter. In some embodiments, the enhancer region is an Enh1 enhancer and/or an Enh2 enhancer region. In some embodiments, the transcript processing control region is a region that encodes signals for 5′-end capping, splicing, and/or 3′-end polyadenylation.

[0198] In some embodiments, the target site is a sequence within a target region that has a sequence corresponding to the sequence positioned between base pair (bp) positions: 1 bp-42 bp, 491 bp-1032 bp, 1750 bp-1799 bp, or 1951 bp-2952 bp of the HBV genome with reference to the Hepatitis B Virus genome (Hepatitis B virus subtype ayw, complete genome, GenBank: U95551.1), SEQ ID NO 650. In some embodiments, the target site is within a target region of the HBV genome in which the target region has the sequence set forth in SEQ ID NO: 1056 or is a complementary sequence thereof. In some embodiments, the target site is within a target region of the HBV genome in which the target region has the sequence set forth in SEQ ID NO: 1058 or is a complementary sequence thereof. In some embodiments, the target site is within a target region of the HBV genome in which the target region has the sequence set forth in SEQ ID NO: 1060 or is a complementary sequence thereof. In some embodiments, the target site is within a target region of the HBV genome in which the target region has the sequence set forth in SEQ ID NO: 1062 or is a complementary sequence thereof.

[0199] In some embodiments, the target site is a sequence within a target region that has a sequence corresponding to the sequence positioned between base pair (bp) positions: 43 bp-490 bp, 1033 bp-1749 bp, 1800 bp-1950 bp, or 2953 bp-3182 bp of the HBV genome with reference to the Hepatitis B Virus genome (Hepatitis B virus subtype ayw, complete genome, GenBank: U95551.1), SEQ ID NO: 650. In some embodiments, the target site is within a target region of the HBV genome in which the target region has the sequence set forth in SEQ ID NO: 1057 or is a complementary sequence thereof. In some embodiments, the target site is within a target region of the HBV genome in which the target region has the sequence set forth in SEQ ID NO: 1059 or is a complementary sequence thereof. In some embodiments, the target site is within a target region of the HBV genome in which the target region has the sequence set forth in SEQ ID NO: 1061 or is a complementary sequence thereof. In some embodiments, the target site is within a target region of the HBV genome in which the target region has the sequence set forth in SEQ ID NO: 1063 or is a complementary sequence thereof.

[0200] In some embodiments, the target site is a sequence within a target region that has a sequence corresponding to the sequence positioned between base pair (bp) positions: 67 bp-392 bp (CpG Island 1), 1033 bp-1749 bp (CpG Island 2), or 2215 bp-2490 bp (CpG Island 3) of the HBV genome with reference to the Hepatitis B Virus genome (Hepatitis B virus subtype ayw, complete genome, GenBank: U95551.1), SEQ ID NO: 650. In some embodiments, the target site is within a target region of the HBV genome in which the target region has the sequence set forth in SEQ ID NO: 1064 or is a complementary sequence thereof. In some embodiments, the target site is within a target region of the HBV genome in which the target region has the sequence set forth in SEQ ID NO: 1059 or is a complementary sequence thereof. In some embodiments, the target site is within a target region of the HBV genome in which the target region has the sequence set forth in SEQ ID NO: 1066 or is a complementary sequence thereof.

[0201] In some embodiments, the target site is in a polymerase gene or a regulatory element thereof. The polymerase gene (also known as P gene) encodes a multifunctional enzyme (also known as P polymerase, HBVgp1, DNA-directed DNA polymerase) that converts the viral RNA genome into dsDNA in viral cytoplasmic capsids. The polymerase displays a DNA polymerase activity that can copy either DNA or RNA templates, and a ribonuclease H (RNase H) activity that cleaves the RNA strand of RNA-DNA heteroduplexes in a partially processive 3′- to 5′-endonucleasic mode. The polymerase gene ORF completely overlaps with the preS/S ORF and partially overlaps with the core family and X gene ORFs. In some embodiments, the target site is a sequence within a target region that has a sequence corresponding to the sequence positioned between 1 bp-1621 bp, 1374 bp-1838 bp or 2307 bp-3182 bp of the HBV genome with reference to the Hepatitis B Virus genome (Hepatitis B virus subtype ayw, complete genome, GenBank: U95551.1), SEQ ID NO: 650.

[0202] In some embodiments, the target site is in an S-family gene or a regulatory element thereof. In some embodiments, the target site is in the S gene, pre-S1 promoter, and/or pre-S2 promoter regions. The S-family genes encode three different structurally related envelope proteins, which are synthesized from alternative initiation codons are termed Large (L), Middle (M), and Small (S) Hepatitis B (HB) proteins (also referred to as L-HBs, M-HBs, and s-HBs, respectively). The three proteins share the same carboxy-terminus but have different amino-terminal extenstions. In some embodiments, the target site is a sequence within a target region that has a sequence corresponding to the sequence positioned between 1 bp-837 bp, 1 bp-155 bp or 2854 bp-3182 bp of the HBV genome with reference to the Hepatitis B Virus genome (Hepatitis B virus subtype ayw, complete genome, GenBank: U95551.1), SEQ ID NO: 650.

[0203] In some embodiments, the target site is in an X-gene or regulatory element thereof. The X-gene (also known as HBx, HBVgp3, peptide X, pX) is a gene that encodes a multifunctional protein that modulates transcriptional regulation, protein degradation pathways, apoptosis, signal transduction, cell cycle progress, and genetic stability by directly or indirectly interacting with host factors. The X-gene protein modulates protein degradation pathways, apoptosis, transcription, signal transduction, cell cycle progress, and genetic stability by directly or indirectly interacting with host factors. In some embodiments, the target site is a sequence within a target region that has a sequence corresponding to the sequence positioned between 1374 bp-1838 bp of the HBV genome with reference to the Hepatitis B Virus genome (Hepatitis B virus subtype ayw, complete genome, GenBank: U95551.1), SEQ ID NO: 650. In some embodiments, the start codon for encoding the HBx protein (HBx start codon) is at residue base pair 1376 of the HBV genome corresponding to positions with reference to the HBV genome set forth in SEQ ID NO: 650. In some embodiments, the start codon for encoding the HBx protein (HBx start codon) is at residue base pair 1374 of the HBV genome corresponding to positions with reference to the HBV genome set forth in SEQ ID NO: 1071. It is found herein that targeting a target site in the X-gene in this region upstream of the start codon using a provided epigenetic-modifying DNA targeting system exhibits high activity for repressing viral replication and transcription of HBV infected cells. In some embodiments, the target region is in a CpG island of the HBV genome. In some embodiments, the target site is a sequence within a target region that has a sequence corresponding to the sequence positioned between 1033-1749 bp with reference to the HBV genome set forth in SEQ ID NO:650. In some embodiments, the target site is in the HBx promoter/Enhancer #1 region, such as within a target region that has a sequence corresponding to the sequence positioned between 1100-1350 bp with reference to the HBV genome set forth in SEQ ID NO: 650. In some embodiments, the target site is in the basal core promoter region, such as within a target region that has a sequence corresponding to the sequence positioned between 1600-1750 bp with reference to the HBV genome set forth in SEQ ID NO: 650.

[0204] In some embodiments, the target site is within a target region spanning within 300 base pairs (bp), within 250 bp, within 200 bp, within 150 bp, within 140 bp, within 130 bp, within 120 bp, within 110 bp or within 100 bp upstream of the HBx start codon. In some embodiments, the target site is within a target region that has a sequence corresponding to the sequence positioned between 1250-1374 bp with reference to the HBV genome set forth in SEQ ID NO: 650. In some embodiments, the target site is within a target region of the HBV genome in which the target region has the sequence set forth in SEQ ID NO: 1068 or is a complementary sequence thereof. In some embodiments, the target site is a sequence within a target region that has a sequence corresponding to the sequence positioned between 1255-1302 bp with reference to the HBV genome set forth in SEQ ID NO: 650. In some embodiments, the target site is within a target region of the HBV genome in which the target region has the sequence set forth in SEQ ID NO: 1069 or is a complementary sequence thereof. In some embodiments, the target site is a sequence within a target region that has a sequence corresponding to the sequence positioned between 1260-1300 bp with reference to the HBV genome set forth in SEQ ID NO: 650. In some embodiments, the target site is within a target region of the HBV genome in which the target region has the sequence set forth in SEQ ID NO: 1070 or is a complementary sequence thereof. In some embodiments, the target site, or each of the target sites, is within a target region located at base pairs between 1060-1480 bp of the HBV genome corresponding to positions with reference to the HBV genome set forth in SEQ ID NO: 650. In some embodiments, the target site is within a target region of the HBV genome in which the target region has the sequence set forth in SEQ ID NO: 1067. Exemplary DNA-binding systems for targeting targets sites in such regions are provided herein, including systems with various DNA-binding domains including CRISPR/Cas systems and ZFPs.

[0205] In some embodiments, the target site is in a core family gene or regulatory element thereof. In some embodiments, the regulatory element thereof is an Enh2 promoter. In some embodiments, the regulatory element thereof is basal core promoter (BCP). The core promoter (CP) region of the viral genome has a pivot role in replication and morphogeneis of the virus (Quarleri J, World Journal of Gastroenterology 20(2): 425-435 (2014)). The core promoter region directs initiation of transcriptions for the synthesis of both the precore mRNA and pre-genomic RNA (pgRNA). The CP region consists of the basal core promoter (BCP), which initiates pre-core mRNA (also known as preC, C gene, HBVgp4) and pgRNA transcription, and consists of an upper regulatory region (URR), which contains positive and negative regulatory elements that modulate promoter activity. Several transcriptional factors bind to regulatory sequence elements of the CP, such as C/EBP, HNF1, HNF3/4, COUP-TF1 to differentially regulate synthesis of pre-C mRNA and pgRNA. The presence of AT-rich regions or TATA-like boxes within the CP are also attributed to transcription of pgRNA. The pre-core mRNA encodes an external core antigen (also known as capsid protein, pre-capsid protein, HBeAg, precore protein, p25) that self-assembles to form an icosahedral capsid that packages the viral genome. The pgRNA is translated to form the polymerase, nucleocapsid protein HBcAg, and the soluble secreted HBeAg proteins. The pgRNA is additionally incorporated into progeny nucleocapsids and reverse transcribed into DNA by the co-assembled viral polymerase into new HBV virions. These mature relaxed circular DNA (rcDNA)-containing nucleocapsids can either redeliver their genomes to the nucleus of the same cell to build a pool of 10-100 copied of cccDNA molecules or can interact with the envelope proteins at the ER/Golgi and can be secreted as new infectious virions (Pollicino T., et al., Journal of hepatology, 61(2):P408-417 (2014)). In some embodiments, the target site is in a core family gene or regulatory element thereof. In some aspects, targeting one or more sites within the core family gene or regulatory element thereof comprises repression of the pgRNA transcript. In some aspects, repression of the pgRNA transcript comprises silencing of HBV replication. In some embodiments, the target site is a sequence within a target region that has a sequence corresponding to the sequence positioned between 1590 bp-1815 bp, 1636 bp-1744, 1751 bp-1769, 1814 bp-1900 bp, 1816 bp-2455, 1800 bp-1950 bp of the HBV genome with reference to the Hepatitis B Virus genome (Hepatitis B virus subtype ayw, complete genome, GenBank: U95551.1), SEQ ID NO: 650. In some embodiments, reduced transcription comprises a reduction in total Hepatitis B viral RNA transcript levels. In some embodiments, reduced transcription comprises a reduction in Hepatitis B pre-core (“preC”) and/or pre-genomic (“pgRNA”) RNA levels.

[0206] In some aspects, the target site is a coding region. In some embodiments, the gene involved in HBV replication and/or HBV transcription encodes an HBV X protein (HBx), S family proteins (HBsAg) such as the small surface protein (S-HBs), middle surface protein (M-HBs), or HBV large surface protein (L-HBs), pre-core protein (HBeAg), HBV core-related antigen (HBcrAg), polymerase, core and precore proteins. In some aspects, the target site is a sequence within a target region that has a sequence corresponding to the sequence positioned between 1 bp-42 bp, 43 bp-1090 bp, 1091 bp-1849 bp, or 1850 bp-2455 bp or 2455 bp-3182 bp of the HBV genome with reference to the Hepatitis B Virus genome (Hepatitis B virus subtype ayw, complete genome, GenBank: U95551.1), SEQ ID NO: 650.

[0207] In some embodiments, repressing transcription comprises a reduction in Hepatitis B surface antigen (HBsAg) and/or Hepatitis B viral core-related-antigen (HBcrAg) protein levels. In some embodiments, repressing transcription comprises a reduction in HBsAg transcript and/or protein levels by at least 90%. In some embodiments, repressing transcription comprises a reduction in HBcrAg transcript and/or protein levels by at least 50% from the cccDNA.

[0208] In some embodiments, repressing transcription comprises a reduction in Hepatitis B pre-core (“preC”), pre-genomic (“pgRNA”), preS1, preS2/S, and HBx levels.

[0209] In some embodiments, the multiplexed epigenetic-modifying DNA-targeting system targets to or binds to a target site in the gene, such as any described above. In some embodiments, the target site is located in a regulatory DNA element of the gene in the cell (e.g. hepatocyte). In some embodiments, a regulatory DNA element is a sequence to which a gene regulatory protein may bind and affect transcription of the gene. In some embodiments, the regulatory DNA element is a cis, trans, distal, proximal, upstream, or downstream regulatory DNA element of a gene. In some embodiments, the regulatory DNA element is a promoter or enhancer of the gene. In some embodiments, the target site is located within a promoter, enhancer, exon, intron, untranslated region (UTR), 5′ UTR, or 3′ UTR of the gene. In some embodiments, a promoter is a nucleotide sequence to which RNA polymerase binds to begin transcription of the gene. In some embodiments, a promoter is a nucleotide sequence typically located between 100 bp and 1000 bp of a transcription start site of a gene, such as within about 100 bp, about 500 bp, about 1000 bp of a transcriptional start site of the gene. In some embodiments the target site is located within a sequence of unknown or known function that is suspected of being able to control expression of a gene.

[0210] In some embodiments, the target site is located within about 50 base pairs (bp), about 100 bp, about 150 bp, about 200 bp, about 250 bp, about 300 bp, about 350 bp, about 400 bp, about 450 bp, about 500 bp, about 600b p, about 650 bp, about 700 bp, about 750 bp, about 800 bp, about 850 bp, about 900 bp, about 1000 bp, about 1050 bp, about 1100 bp, about 1200 bp, about 1250 bp, about 1300 bp, about 1350 bp about 1400 bp, about 1450 bp, about 1500 bp, of a transcription start site.

[0211] In some embodiments, the target site is positioned within a target region that is located at base pairs between 1 bp-3300 bp of the HBV genome. In some embodiments, the target site is a sequence within a target region that has a sequence corresponding to the sequence positioned between 43 bp-490 bp, 1033 bp-1749 bp, 1800 bp-1950 bp, or 2953 bp-3182 of the HBV genome with reference to the Hepatitis B Virus genome (Hepatitis B virus subtype ayw, complete genome, GenBank: U95551.1), SEQ ID NO 650. In some embodiments, the target site is a sequence within a target region that has a sequence corresponding to the sequence positioned between 1 bp-42 bp, 491 bp-1032 bp, 1750 bp-1799 bp, or 1951 bp-2952 bp or 3198 bp-3182 bp of the HBV genome with reference to the Hepatitis B Virus genome (Hepatitis B virus subtype ayw, complete genome, GenBank: U95551.1), SEQ ID NO 650. According to phylogenetic analyses and sequence divergence, HBV can be classified into 10 genotypes (A to J) based upon an inter-group divergence of 8 percent or more in the complete nucleotide sequence (Norder H, et. a., Complete genomes, phylogenetic relatedness, and structural proteins of six strains of the hepatitis B virus, four of which represent two new genotypes. Virology. 1994 February; 198(2):489-503; Stuyver L, et. al., A new genotype of hepatitis B virus: complete genome and phylogenetic relatedness. J Gen Virol. 2000 January; 81(Pt 1):67-74, Arauz-Ruiz P, et. al., Genotype H: a new Amerindian genotype of hepatitis B virus revealed in Central America. J Gen Virol. 2002 August; 83(Pt 8):2059-2073)). There is evidence suggesting that HBV genotypes influence clinical outcomes, mutational patterns in the precore and core promoter regions, HbeAg seroconversion rates, and response to interferon therapy. Most genotypes have specific geographic distributions; genotypes A and D are prevalent in Western Europe and North America, and genotypes B and C are prevalent in East Asia and Oceania.

[0212] In some embodiments, the target site is at least 70% homologous to all Hepatitis B viral genotypes (e.g., genomes). In some embodiments, the target site is at least 70% homologous to at least 500, at least 1000, at least 1500, at least 2000, at least 2500, at least 3000, at least 3500, at least 4000, at least 4500, at least 5000, at least 5500, at least 6000, at least 6500, at least 7000 Hepatitis B viral genomes.

[0213] In some embodiments, the target site is at least 70% homologous to at least 1000 Hepatitis B viral genomes and comprises up to two mismatches. In some embodiments, the target site comprises the sequence set forth in any one of SEQ ID NOS: 1-195, a contiguous portion thereof of at least 14 nucleotides (nt) of any one of SEQ ID NOS: 1-195, or a complementary sequence of any of the foregoing. In some embodiments, the target site is a contiguous portion of any one of SEQ ID NOS: 1-195 that is 15, 16, 17, 18 or 19 nucleotides in length, or a complementary sequence of any of the foregoing. In some embodiments, the target site is a sequence having at or at least 80%, 85%, 90%, 91%, 92%, 93%, 94%, 95%, 96%, 97%, 98%, 99%, 99.5%, 99.9%, or 100% sequence identity to all or a contiguous portion of a target site sequence described herein above. In some embodiments, the target site is the sequence set forth in any one of SEQ ID NOS: 1-195.

[0214] In some of any embodiments, that target site is a sequence of 14 to 22 nucleotides. In some of any embodiments, that target site is a sequence of 14 to 19 nucleotides. In some of any embodiments, that target site is a sequence of 14 nucleotides. In some of any embodiments, that target site is a sequence of 15 nucleotides. In some of any embodiments, that target site is a sequence of 16 nucleotides. In some of any embodiments, that target site is a sequence of 17 nucleotides. In some of any embodiments, that target site is a sequence of 18 nucleotides. In some of any embodiments, that target site is a sequence of 19 nucleotides.

[0215] In any of the embodiments provided herein, the target site is complementary to a referenced sequence (i.e. particular sequence set forth by SEQ ID NO with reference to the Sequence Listing). In some of any embodiments, a complementary sequence is a reverse complement of the referenced sequence.

[0216] In any of the embodiments provided herein, the target site comprises the referenced sequence (i.e. particular sequence set forth by SEQ ID NO with reference to the Sequence Listing). In any of the embodiments provided herein, the target site is the sequence set forth by the referenced sequence (i.e. particular sequence set forth by SEQ ID NO with reference to the Sequence Listing).

[0217] In any of the embodiments provided herein, the target site is a contiguous portion of at least 14 nucleotides (14 nt) of a referenced sequence (i.e. particular sequence set forth by SEQ ID NO with reference to the Sequence Listing). In some embodiments, the contiguous portion is 15 nucleotides. In some embodiments, the contiguous portion is 16 nucleotides. In some embodiments, the contiguous portion is 17 nucleotides. In some embodiments, the contiguous portion is 18 nucleotides. In some embodiments, the contiguous portion is 19 nucleotides.

[0218] In some embodiments, the target site is at least 90% homologous to all Hepatitis B viral genomes. In some embodiments, target site is at least 90% homologous to

[0219] at least 500, at least 1000, at least 1500, at least 2000, at least 2500, at least 3000, at least 3500, at least 4000, at least 4500, at least 5000, at least 5500, at least 6000, at least 6500, at least 7000 Hepatitis B viral genomes.

[0220] In some embodiments, the target site is at least 90% homologous to at least a 1000 Hepatitis B viral genomes and comprises one or two mismatches. In some embodiments, the target site comprises the sequence set forth in any one of SEQ ID NOS: 35-100, a contiguous portion thereof of at least 14nt of any one of SEQ ID NOS: 35-100, or a complementary sequence of any of the foregoing. In some embodiments, the target site is a contiguous portion of any one of SEQ ID NOS: 35-100 that is 15, 16, 17, 18 or 19 nucleotides in length, or a complementary sequence of any of the foregoing. In some embodiments, the target site is a sequence having at or at least 80%, 85%, 90%, 91%, 92%, 93%, 94%, 95%, 96%, 97%, 98%, 99%, 99.5%, 99.9%, or 100% sequence identity to all or a contiguous portion of a target site sequence described herein above. In some embodiments, the target site is the sequence set forth in any one of SEQ ID NOS: 35-100.

[0221] In some embodiments, the mismatches are located in the first 12 nt on the 5′ end of the protospacer adjacent motif (PAM) as represented by ‘n’ in ‘nnnnnnnnnnnnNNNNNNNN-NGG’.

[0222] In some embodiments, the target site is at least 90% homology to at least 1000 Hepatitis B viral genomes and comprises zero mismatches. In some embodiments, the target site comprises the sequence set forth in any one of SEQ ID NOS: 1-34, a contiguous portion thereof of at least 14nt of any one of SEQ ID NOS: 1-34, or a complementary sequence of any of the foregoing. In some embodiments, the target site is a contiguous portion of any one of SEQ ID NOS: 1-34 that is 15, 16, 17, 18 or 19 nucleotides in length, or a complementary sequence of any of the foregoing. In some embodiments, the target site is a sequence having at or at least 80%, 85%, 90%, 91%, 92%, 93%, 94%, 95%, 96%, 97%, 98%, 99%, 99.5%, 99.9%, or 100% sequence identity to all or a contiguous portion of a target site sequence described herein above. In some embodiments, the target site is the sequence set forth in any one of SEQ ID NOS: 1-34.

[0223] In any of the embodiments herein, the target site, or each of the target sites, comprises the sequence set forth in any one of SEQ ID NOS: 175, 138, 192, 152, 118, 125, 185, 63, 116, 124, 35, 82, a contiguous portion thereof of at least 14 nucleotides (nt), or a complementary sequence of any of the foregoing. In some embodiments, the target site is a contiguous portion of any one of SEQ ID NOS: 175, 138, 192, 152, 118, 125, 185, 63, 116, 124, 35, 82, that is 15, 16, 17, 18 or 19 nucleotides in length, or a complementary sequence of any of the foregoing. In some embodiments, the target site is a sequence having at or at least 80%, 85%, 90%, 91%, 92%, 93%, 94%, 95%, 96%, 97%, 98%, 99%, 99.5%, 99.9%, or 100% sequence identity to all or a contiguous portion of a target site sequence described herein above. In some embodiments, the target site is the sequence set forth in any one of SEQ ID NOS: 175, 138, 192, 152, 118, 125, 185, 63, 116, 124, 35, 82. In some embodiments, the reduction in gene expression or the change in the level of transcripts in a cell is greater than 90% compared to the level of gene in a control cell.

[0224] In any of the embodiments herein, the target site, or each of the target sites, comprises the sequence set forth in any one of SEQ ID NOS: 5, 10, 12, 18, 22, 26, 29, 38, 56, 61, 62, 63, 68, 72, 79, 80, 82, 84, 98, 99, 116, 118, 121, 124, 125, 135, 138, 143, 150, 152, 158, 164, 175, 176, 182, 185, 189, 190, 192, a contiguous portion thereof of at least 14 nucleotides (nt), or a complementary sequence of any of the foregoing. In some embodiments, the target site is a contiguous portion of any one of SEQ ID NOS: 5, 10, 12, 18, 22, 26, 29, 38, 56, 61, 62, 63, 68, 72, 75, 79, 80, 82, 84, 98, 99, 116, 118, 121, 124, 125, 135, 138, 143, 150, 152, 158, 164, 175, 176, 182, 185, 189, 190, 192, that is 15, 16, 17, 18 or 19 nucleotides in length, or a complementary sequence of any of the foregoing. In some embodiments, the target site is a sequence having at or at least 80%, 85%, 90%, 91%, 92%, 93%, 94%, 95%, 96%, 97%, 98%, 99%, 99.5%, 99.9%, or 100% sequence identity to all or a contiguous portion of a target site sequence described herein above. In some embodiments, the target site is the sequence set forth in any one of SEQ ID NOS: 5, 10, 12, 18, 22, 26, 29, 38, 56, 61, 62, 63, 68, 72, 75, 79, 80, 82, 84, 98, 99, 116, 118, 121, 124, 125, 135, 138, 143, 150, 152, 158, 164, 175, 176, 182, 185, 189, 190, or 192. In some embodiments, the reduction in gene expression or the change in the level of transcripts in a cell is greater than 80% compared to the level of gene in a control cell.

[0225] In any of the embodiments herein, the target site, or each of the target sites, comprises the sequence set forth in any one of SEQ ID NOS: 5, 6, 12, 18, 22, 26, 29, 38, 42, 43, 51, 56, 61, 63, 68, 72, 75, 79, 82, 84, 88, 89, 98, 99, 113, 116, 121, 124, 125, 118, 130, 133, 135, 138, 143, 150, 152, 155, 158, 164, 165, 175, 176, 182, 185, 189, 190, 192, a contiguous portion thereof of at least 14 nucleotides (nt), or a complementary sequence of any of the foregoing. In some embodiments, the target site is a contiguous portion of any one of SEQ ID NOS: 5, 6, 12, 18, 22, 26, 29, 38, 42, 43, 51, 56, 61, 63, 68, 72, 75, 79, 82, 84, 88, 89, 98, 99, 113, 116, 121, 124, 125, 118, 130, 133, 135, 138, 143, 150, 152, 155, 158, 164, 165, 175, 176, 182, 185, 189, 190, 192 that is 15, 16, 17, 18 or 19 nucleotides in length, or a complementary sequence of any of the foregoing. In some embodiments, the target site is a sequence having at or at least 80%, 85%, 90%, 91%, 92%, 93%, 94%, 95%, 96%, 97%, 98%, 99%, 99.5%, 99.9%, or 100% sequence identity to all or a contiguous portion of a target site sequence described herein above. In some embodiments, the target site is the sequence set forth in any one of SEQ ID NOS: 5, 6, 12, 18, 22, 26, 29, 38, 42, 43, 51, 56, 61, 63, 68, 72, 75, 79, 82, 84, 88, 89, 98, 99, 113, 116, 121, 124, 125, 118, 130, 133, 135, 138, 143, 150, 152, 155, 158, 164, 165, 175, 176, 182, 185, 189, 190, or 192. In some embodiments, the reduction in gene expression or the change in the level of transcripts in a cell is greater than 75% compared to the level of gene in a control cell.

[0226] In any of the embodiments herein, the target site, or each of the target sites, comprises the sequence set forth in any one of SEQ ID NOs: 22, 63, 75, 99, 116, 124, 138, 143, 150, 152, 175, 176, 192, a contiguous portion thereof of at least 14 nucleotides (nt), or a complementary sequence of any of the foregoing. In some embodiments, the target site comprises the sequence SEQ ID NO: 22, 63, 75, 99, 116, 124, 138, 143, 150, 152, 175, 176, 192, that is 15, 16, 17, 18 or 19 nucleotides in length, or a complementary sequence of any of the foregoing. In some embodiments, the target site is a sequence having at or at least 80%, 85%, 90%, 91%, 92%, 93%, 94%, 95%, 96%, 97%, 98%, 99%, 99.5%, 99.9%, or 100% sequence identity to all or a contiguous portion of a target site sequence described herein above. In some embodiments, the target site is the sequence set forth in any one of SEQ ID NOS: 22, 63, 75, 99, 116, 124, 138, 143, 150, 152, 175, 176, or 192.

[0227] In any of the embodiments herein, the target site, or each of the target sites, comprises the sequence set forth in any one of SEQ ID NOS: 12, 18, 20, 22, 26, 27, 46, 50, 63, 66, 73, 79, 185, 192, a contiguous portion thereof of at least 14 nucleotides (nt), or a complementary sequence of any of the foregoing. In some embodiments, the target site is a contiguous portion of any one of SEQ ID NOS: 12, 18, 20, 22, 26, 27, 46, 50, 63, 66, 73, 79, 185, 192, that is 15, 16, 17, 18 or 19 nucleotides in length, or a complementary sequence of any of the foregoing. In some embodiments, the target site is a sequence having at or at least 80%, 85%, 90%, 91%, 92%, 93%, 94%, 95%, 96%, 97%, 98%, 99%, 99.5%, 99.9%, or 100% sequence identity to all or a contiguous portion of a target site sequence described herein above. In some embodiments, the target site is the sequence set forth in any one of SEQ ID NOS: 12, 18, 20, 22, 26, 27, 46, 50, 63, 66, 73, 79, 185, or 192.

[0228] In some embodiments, the target site, or each of the target sites, comprises the nucleotide sequence set forth in any one of SEQ ID NOS:1028-1055, a contiguous portion thereof of at least 12 nt, or a complementary sequence of any of the foregoing. In some embodiments, the target site is a contiguous portion of any one of SEQ ID NOS: 1028-1055 that is 13, 14, 16, 16, 17 or 18 nucleotides in length, or a complementary sequence of any of the foregoing. In some embodiments, the target site is the sequence set forth in any one of SEQ ID NOS: 1028-1055.

[0229] In some embodiments, the target site, or each of the target sites, comprises the sequence set forth in SEQ ID NO: 22, a contiguous portion thereof of at least 14 nucleotides (nt), or a complementary sequence of the foregoing. In any of the embodiments herein, the target site, or each of the target sites, comprises a contiguous portion of the sequence set forth in SEQ ID NO: 22 that is 14-19 nucleotides (nt) in length, or a complementary sequence of the foregoing. In some embodiments, the target site is the sequence set forth in SEQ ID NO: 22. In some embodiments, the target site may be targeted by a DNA-targeting system provided herein. In some embodiments, the DNA-binding domain is a dCas9 that is a dSpCas9 and is used in combination with a complementary gRNA for targeting to the target site. In some embodiments, the gRNA has a spacer sequence set forth in SEQ ID NO:217 or a contiguous portion thereof that is complementary to the target site. In some embodiments, the gRNA further includes a scaffold sequence for dSpCas9 set forth in SEQ ID NO:587. In some embodiments, the DNA-targeting system includes an dSpCas9 fusion protein with a effector domain described herein, and the gRNA set forth in SEQ ID NO:22 (e.g, HBVg_22).

[0230] In some embodiments, the target site, or each of the target sites, comprises the sequence set forth in SEQ ID NO: 63, a contiguous portion thereof of at least 14 nucleotides (nt), or a complementary sequence of the foregoing. In any of the embodiments herein, the target site, or each of the target sites, comprises a contiguous portion of the sequence set forth in SEQ ID NO: 63 that is 14-20 nucleotides (nt) in length, or a complementary sequence of the foregoing. In some embodiments, the target site is the sequence set forth in SEQ ID NOS: 63. In some embodiments, the target site may be targeted by a DNA-targeting system provided herein. In some embodiments, the DNA-binding domain is a dCas9 that is a dSpCas9 and is used in combination with a complementary gRNA for targeting to the target site. In some embodiments, the gRNA has a spacer sequence set forth in SEQ ID NO:217 or a contiguous portion thereof that is complementary to the target site. In some embodiments, the gRNA further includes a scaffold sequence for SpCas9 set forth in SEQ DI NO:587. In some embodiments, the DNA-targeting system includes an dSpCas9 fusion protein with a effector domain described herein, and the gRNA set forth in SEQ ID NO:63 (e.g, HBVg_63).

[0231] In any of the embodiments herein, the target site, or each of the target sites, comprises the sequence set forth in SEQ ID NO: 1045, a contiguous portion thereof of at least 12 nucleotides (nt), or a complementary sequence of the foregoing. In any of the embodiments herein, the target site, or each of the target sites, comprises a contiguous portion of the sequence set forth in SEQ ID NO: 1045 that is 12-18 nucleotides (nt) in length, or a complementary sequence of the foregoing. In some embodiments, the target site is the sequence set forth in SEQ ID NOS: 1045. In some embodiments, the DNA-binding domain is a eZFP for targeting to the target site. In some embodiments, the ZFP includes recognition motifs set forth in SEQ ID NOS: 822, 823, 824, 825, 826 and 827. In some embodiments, the eZFP has the sequence set forth in SEQ ID NO: 709. In some embodiments, the eZFP is the eZFP designated eZFP_18.

[0232] In any of the embodiments herein, the target site, or each of the target sites, comprises the sequence set forth in SEQ ID NO: 1046, a contiguous portion thereof of at least 12 nucleotides (nt), or a complementary sequence of the foregoing. In any of the embodiments herein, the target site, or each of the target sites, comprises a contiguous portion of the sequence set forth in SEQ ID NO: 1046 that is 12-18 nucleotides (nt) in length, or a complementary sequence of the foregoing. In some embodiments, the target site is the sequence set forth in SEQ ID NOS: 1046. In some embodiments, the DNA-binding domain is an eZFP for targeting to the target site. In some embodiments, the ZFP includes recognition motifs set forth in SEQ ID NOS: 828, 829, 830, 831, 832 and 833. In some embodiments, the eZFP has the sequence set forth in SEQ ID NO: 710. In some embodiments, the eZFP is the eZFP designated eZFP_19.

[0233] In any of the embodiments herein, the target site, or each of the target sites, comprises the sequence set forth in SEQ ID NO: 1052, a contiguous portion thereof of at least 12 nucleotides (nt), or a complementary sequence of the foregoing. In any of the embodiments herein, the target site, or each of the target sites, comprises a contiguous portion of the sequence set forth in SEQ ID NO: 1052 that is 12-18 nucleotides (nt) in length, or a complementary sequence of the foregoing. In some embodiments, the target site is the sequence set forth in SEQ ID NOS: 1052. In some embodiments, the DNA-binding domain is a eZFP for targeting to the target site. In some embodiments, the ZFP includes recognition motifs set forth in SEQ ID NOS: 864, 865, 866, 867, 868 and 869. In some embodiments, the eZFP has the sequence set forth in SEQ ID NO: 716. In some embodiments, the eZFP is the eZFP designated eZFP_25.

[0234] In some embodiments, the target site is present in a covalently closed circular DNA (cccDNA), relaxed circular DNA (rcDNA) and/or is integrated in the human genomic DNA. In some embodiments, targeting the target site results in silencing of HBV replication (e.g., reduced HBV replication) and/or HBV transcription.

[0235] In some embodiments, provided herein are multiplexed epigenetic-modifying DNA-targeting systems that target a combination of at least two target genes or regulatory DNA elements thereof described herein. In some embodiments, the multiplexed epigenetic-modifying DNA-targeting systems target two, three, four, five, six or more target genes or regulatory DNA elements thereof described herein.

[0236] In some embodiments, in provided multiplexed epigenetic-modifying DNA-targeting systems the target sites are each in a different HBV gene. In some embodiments, the target sites are each in the same HBV gene.

[0237] In some embodiments, provided herein are multiplexed epigenetic-modifying DNA-targeting systems that target any combination of genes and/or regulatory elements thereof described herein.

[0238] In some embodiments, provided herein are multiplexed epigenetic-modifying DNA-targeting systems that target a first gene or a regulatory element thereof and a second gene or a regulatory element thereof. In some embodiments, the first gene or regulatory element thereof is selected from the list consisting of the polymerase gene, S-family gene, X-gene, core family gene, pre-S1 promoter, pre-S2 promoter, X promoter, basal core promoter, Enh1 enhancer, Enh2 enhancer, a transcript processing control region, and any coding region within the HBV genome, the second gene or regulatory element thereof is selected from the list consisting of the polymerase gene, S-family gene, X-gene, core family gene, pre-S1 promoter, pre-S2 promoter, X promoter, basal core promoter, Enh1 enhancer, Enh2 enhancer, a transcript processing control region, and any coding region within the HBV genome, and the first gene or a regulatory element thereof is different from the second gene or a regulatory element thereof. The first and second target site can be any as described above.

[0239] In some embodiments, provided herein are multiplexed epigenetic-modifying DNA-targeting systems that target a first regulatory element and a second regulatory element. In some embodiments, the first regulatory element and second regulatory element thereof are selected from a combination listed in Table 1.

TABLE 1
Combinations of a first regulatory element and a second
regulatory element targeted by a multiplexed epigenetic-
modifying DNA-targeting system provided herein

| First regulatory element | Second regulatory element |
|---|---|
| L-HBs promoter | M-HBs promoter |
| L-HBs promoter | S-HBs promoter |
| L-HBs promoter | X-promoter/Enh1 promoter |
| L-HBs promoter | Basal core promoter/Enh2 enhancer |
| M-HBs promoter | S-HBs promoter |
| M-HBs promoter | X-promoter/Enh1 promoter |
| M-HBs promoter | Basal core promoter/Enh2 enhancer |
| S-HBs promoter | X-promoter/Enh1 promoter |
| S-HBs promoter | Basal core promoter/Enh2 enhancer |
| X-promoter/Enh1 promoter | Basal core promoter/Enh2 enhancer |

[0240] In some embodiments, provided herein are multiplexed epigenetic-modifying DNA-targeting systems that target a first gene or a regulatory element thereof, a second gene or a regulatory element thereof and a third gene or a regulatory element thereof. In some embodiments, the first gene or regulatory element thereof is selected from the list consisting of the polymerase gene, S-family gene, X-gene, core family gene, pre-S1 promoter, pre-S2 promoter, X promoter, basal core promoter, Enh1 enhancer, Enh2 enhancer, a transcript processing control region, and any coding region within the HBV genome, the second gene or regulatory element thereof is selected from the list consisting of the polymerase gene, S-family gene, X-gene, core family gene, pre-S1 promoter, pre-S2 promoter, X promoter, basal core promoter, Enh1 enhancer, Enh2 enhancer, a transcript processing control region, and any coding region within the HBV genome, the third gene or regulatory element thereof is selected from the list consisting of the polymerase gene, S-family gene, X-gene, core family gene, pre-S1 promoter, pre-S2 promoter, X promoter, basal core promoter, Enh1 enhancer, Enh2 enhancer, a transcript processing control region, and the first gene or a regulatory element thereof, the second gene or a regulatory element thereof and the third gene or a regulatory element thereof are different from each other. The first, second and third target site can be any as described above.

[0241] In some embodiments, provided herein are multiplexed epigenetic-modifying DNA-targeting systems that target a first regulatory element, a second regulatory element, and a third regulatory element thereof. In some embodiments, the first regulatory element is selected from the list consisting of L-HBs promoter, M-HBs promoter, S-HBs promoter, X-promoter, Basal core promoter, Enh1 enhancer, and Enh2 enhancer, the second regulatory element thereof is selected from the list consisting of L-HBs promoter, M-HBs promoter, S-HBs promoter, X-promoter, Basal core promoter, Enh1 enhancer, and Enh2 enhancer, the third regulatory element thereof is selected from the list consisting of L-HBs promoter, M-HBs promoter, S-HBs promoter, X-promoter, Basal core promoter, Enh1 enhancer, and Enh2 enhancer, and the first, second, and third regulatory elements are different. In some embodiments, the first regulatory element is Enh1 enhancer, the second regulatory element is selected from the list consisting of L-HBs promoter, M-HBs promoter, S-HBs promoter, X-promoter, Basal core promoter, and Enh2 enhancer, the third regulatory element is selected from the list consisting of L-HBs promoter, M-HBs promoter, S-HBs promoter, X-promoter, Basal core promoter, and Enh2 enhancer, and the second regulatory element and third regulatory element thereof are different. In some embodiments, the first regulatory element is Enh1 enhancer, the second regulatory element is L-HBs, and the third regulatory element is selected from the list consisting of M-HBs promoter, S-HBs promoter, X-promoter, Basal core promoter, and Enh2 enhancer.

[0242] In some embodiments, the first regulatory element, second regulatory element, and third regulatory element are selected from a combination listed in Table 2.

TABLE 2
Combinations of a first regulatory element, second regulatory
element, and third regulatory element targeted by a multiplexed
epigenetic-modifying DNA-targeting system provided herein.

| First regulatory | Second regulatory | Third regulatory |
|---|---|---|
| element | element | element |
| L-HBs promoter | M-HBs promoter | S-HBs promoter |
| L-HBs promoter | M-HBs promoter | X-promoter/Enh1 promoter |
| L-HBs promoter | M-HBs promoter | Basal core promoter/Enh2 |
| | | enhancer |
| L-HBs promoter | S-HBs promoter | X-promoter/Enh1 promoter |
| L-HBs promoter | S-HBs promoter | Basal core promoter/Enh2 |
| | | enhancer |
| L-HBs promoter | X-promoter/Enh1 | Basal core promoter/Enh2 |
| | promoter | enhancer |
| M-HBs promoter | S-HBs promoter | X-promoter/Enh1 promoter |
| M-HBs promoter | S-HBs promoter | Basal core promoter/Enh2 |
| | | enhancer |
| M-HBs promoter | X-promoter/Enh1 | Basal core promoter/Enh2 |
| | promoter | enhancer |
| S-HBs promoter | X-promoter/Enh1 | Basal core promoter/Enh2 |
| | promoter | enhancer |

[0243] In some embodiments, provided herein are multiplexed epigenetic-modifying DNA-targeting systems that target a first gene or a regulatory element thereof, a second gene or a regulatory element thereof, a third gene or a regulatory element thereof and a fourth gene or regulatory element thereof. In some embodiments, the first gene or regulatory element thereof is selected from the list consisting of the polymerase gene, S-family gene, X-gene, core family gene, pre-S1 promoter, pre-S2 promoter, X promoter, basal core promoter, Enh1 enhancer, Enh2 enhancer, a transcript processing control region, and any coding region within the HBV genome, the second gene or regulatory element thereof is selected from the list consisting of the polymerase gene, S-family gene, X-gene, core family gene, pre-S1 promoter, pre-S2 promoter, X promoter, basal core promoter, Enh1 enhancer, Enh2 enhancer, a transcript processing control region, and any coding region within the HBV genome, the third gene or regulatory element thereof is selected from the list consisting of the polymerase gene, S-family gene, X-gene, core family gene, pre-S1 promoter, pre-S2 promoter, X promoter, basal core promoter, Enh1 enhancer, Enh2 enhancer, a transcript processing control region, the fourth gene or regulatory element thereof is selected from the list consisting of the polymerase gene, S-family gene, X-gene, core family gene, pre-S1 promoter, pre-S2 promoter, X promoter, basal core promoter, Enh1 enhancer, Enh2 enhancer, a transcript processing control region and the first gene or a regulatory element thereof, the second gene or a regulatory element thereof, the third gene or a regulatory element thereof, and the fourth gene or a regulatory element thereof are different from each other. The first, second, third and fourth target site can be any as described above.

[0244] In some embodiments, provided herein are multiplexed epigenetic-modifying DNA-targeting systems that target the same gene or a regulatory element thereof. For example, two or more multiplexed epigenetic-modifying DNA-targeting systems target the same or common gene or regulatory element thereof. In some embodiments, the gene or regulatory element thereof is selected from the list consisting of the polymerase gene, S-family gene, X-gene, core family gene, pre-S1 promoter, pre-S2 promoter, X promoter, basal core promoter, Enh1 enhancer, Enh2 enhancer, a transcript processing control region, and any coding region within the HBV genome, the second gene or regulatory element thereof is selected from the list consisting of the polymerase gene, S-family gene, X-gene, core family gene, pre-S1 promoter, pre-S2 promoter, X promoter, basal core promoter, Enh1 enhancer, Enh2 enhancer, a transcript processing control region, and any coding region within the HBV genome. In some embodiments, at least 2, at least 3, at least 4, at least 5, at least 6, at least 7, at least 8, at least 9, at least 10, at least 20, at least 30, multiplexed epigenetic-modifying DNA-targeting systems target the same gene or a regulatory element thereof.

[0245] In some embodiments, the target site for multiplexed editing (e.g., by multiplexed epigenetic-modifying DNA-targeting systems described herein) is the sequence set forth in any one of SEQ ID NOS: 12, 18, 20, 22, 26, 27, 46, 50, 63, 66, 73, 79, 185, 192. In some embodiments, the target site for multiplexed editing (e.g., by multiplexed epigenetic-modifying DNA-targeting systems described herein) is the sequence set forth in SEQ ID NO: 22. The target site can be any as described above.

### B. CRISPR-Based DNA-Targeting Systems

[0246] Provided herein are epigenetic DNA-targeting systems based on CRISPR/Cas systems, i.e., CRISPR/Cas-based DNA-targeting systems that are able to bind to a target site in a target gene or regulatory element thereof. In some embodiments, the provided epigenetic DNA-targeting systems are multiplexed epigenetic-DNA-targeting systems based on CRISPR/Cas systems, i.e., CRISPR/Cas-based DNA-targeting systems that are able to target sites in a combination of target genes or regulatory element thereof.

[0247] In some embodiments, the CRISPR/Cas DNA-binding domain is nuclease inactive, such as includes a dCas (e.g. dCas9) so that the system binds to the target site in a target gene or regulatory element thereof without mediating nucleic acid cleavage at the target site. In some embodiments, the DNA-targeting system does not introduce a genetic disruption or a DNA break. The CRISPR/Cas-based DNA-targeting systems may be used to modulate expression of a target gene in a cell, such as a hepatocyte. In some embodiments, the target gene or regulatory element thereof may include any as described herein, including any described above in Section I.A. In some embodiments, the target site of the target gene or regulatory element thereof may include any as described herein, including any described above in Section I.A. In some embodiments, the CRISPR/Cas-based DNA-targeting system can include any known Cas enzyme, and generally a nuclease-inactive or dCas. In some embodiments, the CRISPR/Cas-based DNA-targeting system includes a fusion protein of a nuclease-inactive Cas protein or a variant thereof and an effector domain that reduces transcription of a gene (e.g., a transcriptional repressor), and at least one gRNA.

[0248] The CRISPR system (also known as CRISPR/Cas system, or CRISPR-Cas system) refers to a conserved microbial nuclease system, found in the genomes of bacteria and archaea, that provides a form of acquired immunity against invading phages and plasmids. Clustered Regularly Interspaced Short Palindromic Repeats (CRISPR), refers to loci containing multiple repeating DNA elements that are separated by non-repeating DNA sequences called spacers. Spacers are short sequences of foreign DNA that are incorporated into the genome between CRISPR repeats, serving as a ‘memory’ of past exposures. Spacers encode the DNA-targeting portion of RNA molecules that confer specificity for nucleic acid cleavage by the CRISPR system. CRISPR loci contain or are adjacent to one or more CRISPR-associated (Cas) genes, which can act as RNA-guided nucleases for mediating the cleavage, as well as non-protein coding DNA elements that encode RNA molecules capable of programming the specificity of the CRISPR-mediated nucleic acid cleavage.

[0249] In Type II CRISPR/Cas systems with the Cas protein Cas9, two RNA molecules and the Cas9 protein form a ribonucleoprotein (RNP) complex to direct Cas9 nuclease activity. The CRISPR RNA (crRNA) contains a spacer sequence that is complementary to a target nucleic acid sequence (target site), and that encodes the sequence specificity of the complex. The trans-activating crRNA (tracrRNA) base-pairs to a portion of the crRNA and forms a structure that complexes with the Cas9 protein, forming a Cas/RNA RNP complex.

[0250] Naturally occurring CRISPR/Cas systems, such as those with Cas9, have been engineered to allow efficient programming of Cas/RNA RNPs to target desired sequences in cells of interest, both for gene-editing and modulation of gene expression. The tracrRNA and crRNA have been engineered to form a single chimeric guide RNA molecule, commonly referred to as a guide RNA (gRNA), for example as described in WO 2013/176772 A1, WO 2014/093661 A2, WO 2014/093655 A2, Jinek, M. et al. Science 337(6096):816-21 (2012), or Cong, L. et al. Science 339(6121):819-23 (2013). The spacer sequence of the gRNA can be chosen by a user to target the Cas/gRNA RNP complex to a desired locus, e.g. a desired target site in the target gene and/or regulatory element thereof.

[0251] Cas proteins have also been engineered to allow targeting of Cas/gRNA RNPs without inducing cleavage at the target site. Mutations in Cas proteins can reduce or abolish nuclease activity of the Cas protein, rendering the Cas protein catalytically inactive. Cas proteins with reduced or abolished nuclease activity are referred to as deactivated Cas (dCas), or nuclease-inactive Cas (iCas) proteins, as referred to interchangeably herein. Exemplary deactivated Cas9 (dCas9) derived from S. pyogenes contains silencing mutations of the RuvC and HNH nuclease domains (D10A and H840A), for example as described in WO 2013/176772 A1, WO 2014/093661 A2, Jinek, M. et al. Science 337(6096):816-21 (2012), and Qi, L. et al. Cell 152(5):1173-83 (2013). Exemplary dCas variants derived from the Cas12 system (i.e. Cpf1) are described, for example in WO 2017/189308 A1 and Zetsche, B. et al. Cell 163(3):759-71 (2015). Conserved domains that mediate nucleic acid cleavage, such as RuvC and HNH endonuclease domains, are readily identifiable in Cas orthologues, and can be mutated to produce inactive variants, for example as described in Zetsche, B. et al. Cell 163(3):759-71 (2015).

[0252] dCas-fusion proteins with transcriptional and/or epigenetic regulators have been used as a versatile platform for ectopically regulating gene expression in target cells. These include fusion of a Cas with an effector domain, such as a transcriptional activator or transcriptional repressor. For example, fusing dCas9 with a transcriptional activator such as VP64 (a polypeptide composed of four tandem copies of VP16, a 16 amino acid transactivation domain of the Herpes simplex virus) can result in robust induction of gene expression. Alternatively, fusing dCas9 with a transcriptional repressor such as KRAB (Krüppel associated box) can result in robust repression of gene expression. A variety of dCas-fusion proteins with transcriptional and epigenetic regulators can be engineered for regulation of gene expression, for example as described in WO 2014/197748, WO 2016/130600, WO 2017/180915, WO 2021/226555, WO 2013/176772, WO 2014/152432, WO 2014/093661, WO 2021/247570, Adli, M. Nat. Commun. 9, 1911 (2018), Perez-Pinera, P. et al. Nat. Methods 10, 973-976 (2013), Mali, P. et al. Nat. Biotechnol. 31, 833-838 (2013), Maeder, M. L. et al. Nat. Methods 10, 977-979 (2013), Gilbert, L. A. et al. Cell 154(2):442-451 (2013), and Nunlez, J. K. et al. Cell 184(9):2503-2519 (2021).

[0253] In some aspects, provided is a DNA-targeting system comprising a fusion protein comprising a DNA-binding domain comprising a nuclease-inactive Cas protein or variant thereof, and an effector domain for reducing transcription or inducing transcriptional repression (i.e. a transcriptional repressor) when targeted to the target gene or regulatory element thereof in the cell (e.g. hepatocyte). In such embodiments, the DNA-targeting system also includes one or more gRNAs, provided in combination or as a complex with the dCas protein or variant thereof, for targeting of the DNA-targeting system to the target site of the target gene or regulatory element thereof. In some embodiments, the fusion protein is guided to a specific target site sequence of the target gene or regulatory element thereof by the guide RNA, wherein the effector domain mediates targeted epigenetic modification to reduce or repress transcription of the target gene. In some embodiments, a combination of gRNAs guides the fusion protein to a combination of target site sequences in a combination of genes or regulatory elements thereof, wherein the effector domain mediates targeted epigenetic modification to reduce or repress transcription of the combination of target genes. Any of a variety of effector domains that reduce or repress transcription can be used as described further below.

[0254] 1. CRISPR-Based DNA-Binding Domains

[0255] In some aspects, the DNA-binding domain comprises a CRISPR-associated (Cas) protein or variant thereof, or is derived from a Cas protein or variant thereof, and is nuclease-inactive (i.e. is a dCas protein).

[0256] In some embodiments, the Cas protein is derived from a Class 1 CRISPR system (i.e. multiple Cas protein system), such as a Type I, Type III, or Type IV CRISPR system. In some embodiments, the Cas protein is derived from a Class 2 CRISPR system (i.e. single Cas protein system), such as a Type II, Type V, or Type VI CRISPR system. In some embodiments, the Cas protein is from a Type V CRISPR system. In some embodiments, the Cas protein is derived from a Cas12 protein (i.e. Cpf1) or variant thereof, for example as described in WO 2017/189308 A1 and Zetsche, B. et al. Cell. 163(3):759-71 (2015). In some embodiments, the Cas protein is derived from a Type II CRISPR system. In some embodiments, the Cas protein is derived from a Cas9 protein or variant thereof, for example as described in WO 2013/176772 A1, WO 2014/152432 A2, WO 2014/093661 A2, WO 2014/093655 A2, Jinek, M. et al. Science 337(6096):816-21 (2012), Mali, P. et al. Science 339(6121):823-6 (2013), Cong, L. et al. Science 339(6121):819-23 (2013), Perez-Pinera, P. et al. Nat. Methods 10, 973-976 (2013), or Mali, P. et al. Nat. Biotechnol. 31, 833-838 (2013). Various CRISPR/Cas systems and associated Cas proteins for use in gene editing and regulation have been described, for example in Moon, S. B. et al. Exp. Mol. Med. 51, 1-11 (2019), Zhang, F. Q. Rev. Biophys. 52, E6 (2019), and Makarova K. S. et al. Methods Mol. Biol. 1311:47-75 (2015).

[0257] In some embodiments, the dCas9 protein can comprise a sequence derived from a naturally occurring Cas9 molecule, or variant thereof. In some embodiments, the dCas9 protein can comprise a sequence derived from a naturally occurring Cas9 molecule of S. pyogenes, S. thermophilus, S. aureus, C. jejuni, N. meningitidis, F. novicida, S. canis, S. auricularis, or variant thereof. In some embodiments, the dCas9 protein comprises a sequence derived from a naturally occurring Cas9 molecule of S. aureus. In some embodiments, the dCas9 protein comprises a sequence derived from a naturally occurring Cas9 molecule of S. pyogenes.

[0258] Non-limiting examples of Cas9 orthologs from other bacterial strains include but are not limited to: Cas proteins identified in Acaryochloris marina MBIC11017; Acetohalobium arabaticum DSM 5501; Acidithiobacillus caldus; Acidithiobacillus ferrooxidans ATCC 23270; Alicyclobacillus acidocaldarius LAA1; Alicyclobacilus acidocaldarius subsp. acidocaldarius DSM 446; Allochromatium vinosum DSM 180; Ammonifex degensii KC4; Anabaena variabilis ATCC 29413; Arthrospira maxima CS-328; Arthrospira platensis str. Paraca; Arthrospira sp. PCC 8005; Bacillus pseudomycoides DSM 12442; Bacillus selenitireducens MLS10; Burkholderiales bacterium 1_1_47; Caldicelulosiruptor becscii DSM 6725; Candidatus Desulforudis audaxviator MP104C; Caldicellulosiruptor hydrothenmalis 108; Clostridium phage c-st; Clostridium botulinum A3 str. Loch Maree; Clostridium botulinum Ba4 str. 657; Clostridium difficile QCD-63q42; Crocosphaera warsonii WH 8501; Cyanothece sp. ATCC 51142; Cyanothece sp. CCY0110; Cyanothece sp. PCC 7424; Cyanothece sp. PCC 7822; Exiguobacterium sibiricum 255-15; Finegoldia magna ATCC 29328; Ktedonobacter racemifer DSM 44963; Lactobacillus delbrueckii subsp. bulgaricus PB2003/044-T3-4; Lactobacillus salivarius ATCC 11741; Listeria innocua; Lyngbya sp. PCC 8106; Marinobacter sp. ELB17; Methanohalobium evestigatum Z-7303; Microcystis phage Ma-LMM01; Microcystis aeruginosa NIES-843; Microscilla marina ATCC 23134; Microcoleus chthonoplastes PCC 7420; Neisseria meningitidis; Nitrosococcus halophilus Nc4; Nocardiopsis dassonvillei subsp. dassonvillei DSM 43111; Nodularia spumigena CCY9414; Nostoc sp. PCC 7120; Oscillatoria sp. PCC 6506; Pelotomaculum_thermopropionicum SI; Petrotoga mobilis SJ95; Polaromonas naphthalenivorans CJ2; Polaromonas sp. JS666; Pseudoalteromonas haloplanktis TAC125; Streptomyces pristinaespiralis ATCC 25486; Streptomyces pristinaespiralis ATCC 25486; Streptococcus thermophilus; Streptomyces viridochromogenes DSM 40736; Streptosporangium roseum DSM 43021; Synechococcus sp. PCC 7335; and Thenmosipho africanus TCF52B (Chylinski et al., RNA Biol., 2013; 10(5): 726-737).

[0259] In some aspects, the Cas protein is a variant that lacks nuclease activity (i.e. is a dCas protein). In some embodiments, the Cas protein is mutated so that nuclease activity is reduced or eliminated. Such Cas proteins are referred to as deactivated Cas or dead Cas (dCas) or nuclease-inactive Cas (iCas) proteins, as referred to interchangeably herein. In some embodiments, the variant Cas protein is a variant Cas9 protein that lacks nuclease activity or that is a deactivated Cas9 (dCas9, or iCas9) protein.

[0260] In some embodiments, the Cas9 protein or a variant thereof is derived from a Staphylococcus aureus Cas9 (SaCas9) protein or a variant thereof. In some embodiments, the variant Cas9 is a Staphylococcus aureus dCas9 protein (dSaCas9) that comprises at least one amino acid mutation selected from D10A and N580A, with reference to numbering of positions of SEQ ID NO: 596. In some embodiments, the variant Cas9 protein comprises the sequence set forth in SEQ ID NO: 597, or an amino acid sequence that has at least 90%, 91%, 92%, 93%, 94%, 95%, 96%, 97%, 98%, or 99% sequence identity thereto.

[0261] In some embodiments, the Cas9 protein or variant thereof is derived from a Streptococcus pyogenes Cas9 (SpCas9) protein or a variant thereof. In some embodiments, the variant Cas9 is a Streptococcus pyogenes dCas9 (dSpCas9) protein that comprises at least one amino acid mutation selected from D10A and H840A, with reference to numbering of positions of SEQ ID NO:598. In some embodiments, the variant Cas9 protein comprises the sequence set forth in SEQ ID NO:599, or an amino acid sequence that has at least 90%, 91%, 92%, 93%, 94%, 95%, 96%, 97%, 98%, or 99% sequence identity thereto.

[0262] 2. Guide RNAs

[0263] In some embodiments, the Cas protein (e.g. dCas9) is provided in combination or as a complex with one or more guide RNA (gRNA). In some aspects, the gRNA is a nucleic acid that promotes the specific targeting or homing of the gRNA/Cas RNP complex to the target site of the target gene and/or regulatory element thereof, such as any described above. In some embodiments, a target site of a gRNA may be referred to as a protospacer.

[0264] Provided herein are gRNAs, such as gRNAs that target or bind to a target site or DNA regulatory element thereof, such as any described above in Section I.A. In some embodiments, the gRNA is capable of complexing with the Cas protein or variant thereof. In some embodiments, the gRNA comprises a gRNA spacer sequence (i.e. a spacer sequence or a guide sequence) that is capable of hybridizing to the target site, or that is complementary to the target site, such as any target site described in Section I.A or further below. In some embodiments, the gRNA comprises a scaffold sequence that complexes with or binds to the Cas protein.

[0265] In some embodiments, the gRNAs provided herein are chimeric gRNAs. In general, gRNAs can be unimolecular (i.e. consisting of a single RNA molecule), or modular (comprising more than one, and typically two, separate RNA molecules). Modular gRNAs can be engineered to be unimolecular, wherein sequences from the separate modular RNA molecules are comprised in a single gRNA molecule, sometimes referred to as a chimeric gRNA, synthetic gRNA, or single gRNA. In some embodiments, the chimeric gRNA is a fusion of two non-coding RNA sequences: a crRNA sequence and a tracrRNA sequence, for example as described in WO 2013/176772 A1, or Jinek, M. et al. Science 337(6096):816-21 (2012). In some embodiments, the chimeric gRNA mimics the naturally occurring crRNA:tracrRNA duplex involved in the Type II Effector system, wherein the naturally occurring crRNA:tracrRNA duplex acts as a guide for the Cas9 protein.

[0266] In some aspects, the spacer sequence of a gRNA is a polynucleotide sequence comprising at least a portion that has sufficient complementarity with the target site or DNA regulatory element thereof (e.g. any described in Section I.A) to hybridize with a target site in the target gene and/or regulatory element thereof and direct sequence-specific binding of a CRISPR complex to the sequence of the target site. Full complementarity is not necessarily required, provided there is sufficient complementarity to cause hybridization and promote formation of a CRISPR complex. In some embodiments, the gRNA comprises a spacer sequence that is complementary, e.g., at least 80%, 85%, 90%, 95%, 98%, 99%, or 100% (e.g., fully complementary), to the target site. The strand of the target nucleic acid comprising the target site sequence may be referred to as the “complementary strand” of the target nucleic acid.

[0267] In some embodiments, the gRNA spacer sequence is between about 14 nucleotides (nt) and about 26 nt, or between 16 nt and 22 nt in length. In some embodiments, the gRNA spacer sequence is 14 nt, 15 nt, 16 nt, 17 nt, 18 nt, 19 nt, 20 nt, 21 nt or 22 nt, 23 nt, 24 nt, 25 nt, or 26 nt in length. In some embodiments, the gRNA spacer sequence is 18 nt, 19 nt, 20 nt, 21 nt or 22 nt in length. In some embodiments, the gRNA spacer sequence is 19 nt in length.

[0268] A target site of a gRNA may be referred to as a protospacer. In some aspects, the spacer is designed to target a protospacer with a specific protospacer-adjacent motif (PAM), i.e. a sequence immediately adjacent to the protospacer that contributes to and/or is required for Cas binding specificity. Different CRISPR/Cas systems have different PAM requirements for targeting. For example, in some embodiments, S. pyogenes Cas9 uses the PAM 5′-NGG-3′(SEQ ID NO:629), where N is any nucleotide. S. aureus Cas9 uses the PAM 5′-NNGRRT-3′ (SEQ ID NO:630), where N is any nucleotide, and R is G or A. N. meningitidis Cas9 uses the PAM 5′-NNNNGATT-3′ (SEQ ID NO:631), where N is any nucleotide. C. jejuni Cas9 uses the PAM 5′-NNNNRYAC-3′ (SEQ ID NO:632), where N is any nucleotide, R is G or A, and Y is C or T. S. thermophilus uses the PAM 5′-NNAGAAW-3′(SEQ ID NO:633), where N is any nucleotide and W is A or T. F. Novicida Cas9 uses the PAM 5′-NGG-3′ (SEQ ID NO:634), where N is any nucleotide. T. denticola Cas9 uses the PAM 5′-NAAAAC-3′(SEQ ID NO:635), where N is any nucleotide. Cas12a (also known as Cpf1) from various species, uses the PAM 5′-=TTV-3′(SEQ ID NO:636). Cas proteins may use or be engineered to use different PAMs from those listed above. For example, mutated SpCas9 proteins may use the PAMs 5′-NGG-3′(SEQ ID NO:629), 5′-NGAN-3′(SEQ ID NO:637), 5′-NGNG-3′(SEQ ID NO:638), 5′-NGAG-3′(SEQ ID NO:639), or 5′-NGCG-3′ (SEQ ID NO:640). In some embodiments, the protospacer of a gRNA for complexing with S. pyogenes Cas9 or variant thereof is set forth in SEQ ID NO: 588. In some embodiments, the protospacer of a gRNA for complexing with S. aureus Cas9 or variant thereof is set forth in SEQ ID NO: 589.

[0269] A spacer sequence may be selected to reduce the degree of secondary structure within the spacer sequence. Secondary structure may be determined by any suitable polynucleotide folding algorithm.

[0270] In some embodiments, the gRNA (including the guide sequence) will comprise the base uracil (U), whereas DNA encoding the gRNA molecule will comprise the base thymine (T). While not wishing to be bound by theory, in some embodiments, it is believed that the complementarity of the guide sequence with the target sequence contributes to specificity of the interaction of the gRNA molecule/Cas molecule complex with a target nucleic acid. It is understood that in a guide sequence and target sequence pair, the uracil bases in the guide sequence will pair with the adenine bases in the target sequence.

[0271] In some embodiments, one, more than one, or all of the nucleotides of a gRNA can have a modification, e.g., to render the gRNA less susceptible to degradation and/or improve bio-compatibility. By way of non-limiting example, the backbone of the gRNA can be modified with a phosphorothioate, or other modification(s). In some cases, a nucleotide of the gRNA can comprise a 2′ modification, e.g., a 2-acetylation, e.g., a 2′ methylation, or other modification(s).

[0272] Methods for designing gRNAs and exemplary targeting domains can include those described in, e.g., International PCT Pub. Nos. WO 2014/197748 A2, WO 2016/130600 A2, WO 2017/180915 A2, WO 2021/226555 A2, WO 2013/176772 A1, WO 2014/152432 A2, WO 2014/093661 A2, WO 2014/093655 A2, WO 2015/089427 A1, WO 2016/049258 A2, WO 2016/123578 A1, WO 2021/076744 A1, WO 2014/191128 A1, WO 2015/161276 A2, WO 2017/193107 A2, and WO 2017/093969 A1.

[0273] In some embodiments, the gRNA provided herein targets a target site present in a covalently closed circular DNA (cccDNA), relaxed circular DNA (rcDNA). In some aspects, the target site may be any HBV genome sequence optimal for depositing DNA methylation that results in silencing of HBV RNA transcription.

[0274] In some embodiments, the target site is at or near a gene or a regulatory element thereof involved in controlling HBV replication and/or HBV transcription. In some aspects, the target site is at or near a promoter. In some aspects, the target site is near an enhancer region. In some aspects, the target site is at or near transcript processing control region. In some aspects, the target site may be any gene optimal for depositing DNA methylation for silencing HBV transcription.

[0275] In some embodiments, the gRNA targets a target site that comprises a sequence selected from any one of SEQ ID NOS: 1-34, as shown in Table 3, a contiguous portion thereof of at least 14 nucleotides, a complementary sequence of any of the foregoing, or a sequence having at or at least 80%, 85%, 90%, 91%, 92%, 93%, 94%, 95%, 96%, 97%, 98%, 99%, 99.5%, 99.9%, or 100% sequence identity to any of the foregoing.

[0276] In some embodiments, the gRNA targets a target site that comprises a sequence selected from any one of SEQ ID NOS: 35-100, as shown in Table 4, or a contiguous portion thereof of at least 14 nt, or a sequence having at or at least 80%, 85%, 90%, 91%, 92%, 93%, 94%, 95%, 96%, 97%, 98%, 99%, 99.5%, 99.9%, or 100% sequence identity to any of the foregoing.

[0277] In some embodiments, a gRNA targets a target site that comprises a sequence selected from any one of SEQ ID NOS:101-195, as shown in Table 5, a contiguous portion thereof of at least 14 nucleotides, a complementary sequence of any of the foregoing, or a sequence having at or at least 80%, 85%, 90%, 91%, 92%, 93%, 94%, 95%, 96%, 97%, 98%, 99%, 99.5%, 99.9%, or 100% sequence identity to any of the foregoing.

[0278] In some embodiments, the gRNA further comprises a scaffold sequence set forth in SEQ ID NO: 587. In some embodiments, the gRNA further comprises a scaffold sequence. In some embodiments, the scaffold sequence comprises the sequence set forth in SEQ ID NO: 587 (GUUUAAGAGCUAUGCUGGAAACAGCAUAGCAAGUUUAAAUAAGGCUAGUCCGUUAUCA ACUUGAAAAAGUGGCACCGAGUCGGUGC), or a sequence having at or at least 80%, 85%, 90%, 91%, 92%, 93%, 94%, 95%, 96%, 97%, 98%, 99%, 99.5%, 99.9%, or 100% sequence identity to all or a portion thereof. In some embodiments, the scaffold sequence is set forth in SEQ ID NO: 587.

[0279] In some embodiments, the gRNA comprises the sequence selected from any one of SEQ ID NOS: 391-585, as shown in Table 6, or a sequence having at or at least 80%, 85%, 90%, 91%, 92%, 93%, 94%, 95%, 96%, 97%, 98%, 99%, 99.5%, 99.9%, or 100% sequence identity to any one of SEQ ID NO: 391-585. In some embodiments, the gRNA is set forth in any one of SEQ ID NOS: 391-585.

[0280] In some embodiments, the gRNA comprises the sequence selected from any one of SEQ ID NOS: 391-424, or a sequence having at or at least 80%, 85%, 90%, 91%, 92%, 93%, 94%, 95%, 96%, 97%, 98%, 99%, 99.5%, 99.9%, or 100% sequence identity to any of the foregoing.

[0281] In some embodiments, the gRNA comprises the sequence selected from any one of SEQ ID NOS: 425-490, or a sequence having at or at least 80%, 85%, 90%, 91%, 92%, 93%, 94%, 95%, 96%, 97%, 98%, 99%, 99.5%, 99.9%, or 100% sequence identity to any of the foregoing.

[0282] In some embodiments, the gRNA comprises the sequence selected from any one of SEQ ID NOS: 490-585, or a sequence having at or at least 80%, 85%, 90%, 91%, 92%, 93%, 94%, 95%, 96%, 97%, 98%, 99%, 99.5%, 99.9%, or 100% sequence identity to any of the foregoing.

[0283] In some embodiments, any of the provided gRNA sequences is complexed with or is provided in combination with a Cas9. In some embodiments, the Cas9 is a dCas9. In some embodiments, the dCas9 is a dSpCas9, such as a dSpCas9 set forth in SEQ ID NO: 599.

TABLE 3
Target site sequences and gRNA spacers with
>90% HBV genomic conservation and no
mismatches (HBV0)

| Target | | | | | RNA |
|---|---|---|---|---|---|
| Site | | | Median | | spac- |
| (proto- | Target | Se- | HBV | | er |
| spacer) | SEQ | quence | posi- | RNAspacer | SEQ |
| sequence | ID | names | tion | sequence | ID |
| CCCTATCTTA | 1 | HBVg_1 | 2310 | CCCUAUCUUA | 196 |
| TCAACACTTC | | | | UCAACACUUC | |
| GCAGAGGTGA | 2 | HBVg_2 | 1834 | GCAGAGGUGA | 197 |
| AAAAGTTGCA | | | | AAAAGUUGCA | |
| TGGACTTCTC | 3 | HBVg_3 | 259 | UGGACUUCUC | 198 |
| TCAATTTTCT | | | | UCAAUUUUCU | |
| ACCCCGCCTG | 4 | HBVg_4 | 209 | ACCCCGCCUG | 199 |
| TAACACGAGC | | | | UAACACGAGC | |
| CCCGCCTGTA | 5 | HBVg_5 | 207 | CCCGCCUGUA | 200 |
| ACACGAGCAG | | | | ACACGAGCAG | |
| CACCACGAGT | 6 | HBVg_6 | 261 | CACCACGAGU | 201 |
| CTAGACTCTG | | | | CUAGACUCUG | |
| GAGGTGAAGC | 7 | HBVg_7 | 1597 | GAGGUGAAGC | 202 |
| GAAGTGCACA | | | | GAAGUGCACA | |
| CCGGAAGTGT | 8 | HBVg_8 | 2333 | CCGGAAGUGU | 203 |
| TGATAAGATA | | | | UGAUAAGAUA | |
| AGAAGATGAG | 9 | HBVg_9 | 434 | AGAAGAUGAG | 204 |
| GCATAGCAGC | | | | GCAUAGCAGC | |
| TCCGCAGTAT | 10 | HBVg_10 | 1277 | UCCGCAGUAU | 205 |
| GGATCGGCAG | | | | GGAUCGGCAG | |
| GGACTTCTCT | 11 | HBVg_11 | 260 | GGACUUCUCU | 206 |
| CAATTTTCTA | | | | CAAUUUUCUA | |
| CCACCCAAGG | 12 | HBVg_12 | 1891 | CCACCCAAGG | 207 |
| CACAGCTTGG | | | | CACAGCUUGG | |
| AGAGAGGTGC | 13 | HBVg_13 | 1535 | AGAGAGGUGC | 208 |
| GCCCCGTGGT | | | | GCCCCGUGGU | |
| GATTGAGATC | 14 | HBVg_14 | 2433 | GAUUGAGAUC | 209 |
| TTCTGCGACG | | | | UUCUGCGACG | |
| CAAGCCTCCA | 15 | HBVg_15 | 1864 | CAAGCCUCCA | 210 |
| AGCTGTGCCT | | | | AGCUGUGCCU | |
| GGCGAGGGAG | 16 | HBVg_16 | 2388 | GGCGAGGGAG | 211 |
| TTCTTCTTCT | | | | UUCUUCUUCU | |
| TCCGGAAGTG | 17 | HBVg_17 | 2334 | UCCGGAAGUG | 212 |
| TTGATAAGAT | | | | UUGAUAAGAU | |
| AAGCCACCCA | 18 | HBVg_18 | 1894 | AAGCCACCCA | 213 |
| AGGCACAGCT | | | | AGGCACAGCU | |
| CCTCCAAGCT | 19 | HBVg_19 | 1868 | CCUCCAAGCU | 214 |
| GTGCCTTGGG | | | | GUGCCUUGGG | |
| GTAAAGAGAG | 20 | HBVg_20 | 1539 | GUAAAGAGAG | 215 |
| GTGCGCCCCG | | | | GUGCGCCCCG | |
| GGCAGATGAG | 21 | HBVg_21 | 157 | GGCAGAUGAG | 216 |
| AAGGCACAGA | | | | AAGGCACAGA | |
| AGGAGTTCCG | 22 | HBVg_22 | 1283 | AGGAGUUCCG | 217 |
| CAGTATGGAT | | | | CAGUAUGGAU | |
| GCTGTGCCTT | 23 | HBVg_23 | 1875 | GCUGUGCCUU | 218 |
| GGGTGGCTTT | | | | GGGUGGCUUU | |
| ACCCCTGCTC | 24 | HBVg_24 | 183 | ACCCCUGCUC | 219 |
| GTGTTACAGG | | | | GUGUUACAGG | |
| CGGAAGTGTT | 25 | HBVg_25 | 2332 | CGGAAGUGUU | 220 |
| GATAAGATAG | | | | GAUAAGAUAG | |
| CCTGCTGGTG | 26 | HBVg_26 | 55 | CCUGCUGGUG | 221 |
| GCTCCAGTTC | | | | GCUCCAGUUC | |
| CGAGGGAGTT | 27 | HBVg_27 | 2386 | CGAGGGAGUU | 222 |
| CTTCTTCTAG | | | | CUUCUUCUAG | |
| GGGGCGCACC | 28 | HBVg_28 | 1520 | GGGGCGCACC | 223 |
| TCTCTTTACG | | | | UCUCUUUACG | |
| AGCTTGGAGG | 29 | HBVg_29 | 1878 | AGCUUGGAGG | 224 |
| CTTGAACAGT | | | | CUUGAACAGU | |
| AAGCCTCCAA | 30 | HBVg_30 | 1865 | AAGCCUCCAA | 225 |
| GCTGTGCCTT | | | | GCUGUGCCUU | |
| CCCCTGCTCG | 31 | HBVg_31 | 184 | CCCCUGCUCG | 226 |
| TGTTACAGGC | | | | UGUUACAGGC | |
| GCGAGGGAGT | 32 | HBVg_32 | 2387 | GCGAGGGAGU | 227 |
| TCTTCTTCTA | | | | UCUUCUUCUA | |
| TACTAGTGCC | 33 | HBVg_33 | 677 | UACUAGUGCC | 228 |
| ATTTGTTCAG | | | | AUUUGUUCAG | |
| GACTTCTCTC | 34 | HBVg_34 | 261 | GACUUCUCUC | 229 |
| AATTTTCTAG | | | | AAUUUUCUAG | |

TABLE 4
Target site sequences and gRNA spacers
with >90% HBV genomic conservation
and 1-2 mismatches (HBV1)

| Target | | | | | RNA |
|---|---|---|---|---|---|
| Site | | | Median | | spac- |
| (proto- | Target | Se- | HBV | RNA | er |
| spacer) | SEQ | quence | posi- | spacer | SEQ |
| sequence | ID | name | tion | sequence | ID |
| ATTGACCCGT | 35 | HBVg_35 | 1906 | AUUGACCCGU | 230 |
| ATAAAGAATT | | | | AUAAAGAAUU | |
| ACCCAAAGAC | 36 | HBVg_36 | 825 | ACCCAAAGAC | 231 |
| AAAAGAAAAT | | | | AAAAGAAAAU | |
| GTCCTCTTAT | 37 | HBVg_37 | 1663 | GUCCUCUUAU | 232 |
| GTAAGACCTT | | | | GUAAGACCUU | |
| TGATCGGGAA | 38 | HBVg_38 | 2930 | UGAUCGGGAA | 233 |
| AGAATCCCAG | | | | AGAAUCCCAG | |
| TTTGCTGACG | 39 | HBVg_39 | 1182 | UUUGCUGACG | 234 |
| CAACCCCCAC | | | | CAACCCCCAC | |
| ATGAATCTAG | 40 | HBVg_40 | 2095 | AUGAAUCUAG | 235 |
| CCACCTGGGT | | | | CCACCUGGGU | |
| GGTCTCCATG | 41 | HBVg_41 | 1616 | GGUCUCCAUG | 236 |
| CGACGTGCAG | | | | CGACGUGCAG | |
| GGACTGAGGC | 42 | HBVg_42 | 659 | GGACUGAGGC | 237 |
| CCACTCCCAT | | | | CCACUCCCAU | |
| CACAGAGTCT | 43 | HBVg_43 | 239 | CACAGAGUCU | 238 |
| AGACTCGTGG | | | | AGACUCGUGG | |
| GAAGAACCAA | 44 | HBVg_44 | 446 | GAAGAACCAA | 239 |
| CAAGAAGATG | | | | CAAGAAGAUG | |
| ACACGGTCCG | 45 | HBVg_45 | 1580 | ACACGGUCCG | 240 |
| GCAGATGAGA | | | | GCAGAUGAGA | |
| GACATGAACA | 46 | HBVg_46 | 1856 | GACAUGAACA | 241 |
| TGAGATGATT | | | | UGAGAUGAUU | |
| GCAGCACAGC | 47 | HBVg_47 | 1394 | GCAGCACAGC | 242 |
| CTAGCAGCCA | | | | CUAGCAGCCA | |
| TCCTGGAATT | 48 | HBVg_48 | 490 | UCCUGGAAUU | 243 |
| AGAGGACAAA | | | | AGAGGACAAA | |
| GTCTTACATA | 49 | HBVg_49 | 1646 | GUCUUACAUA | 244 |
| AGAGGACTCT | | | | AGAGGACUCU | |
| TTGTGGGTCA | 50 | HBVg_50 | 2809 | UUGUGGGUCA | 245 |
| CCATATTCTT | | | | CCAUAUUCUU | |
| CGCAAAATAC | 51 | HBVg_51 | 627 | CGCAAAAUAC | 246 |
| CTATGGGAGT | | | | CUAUGGGAGU | |
| GGGTTGCGTC | 52 | HBVg_52 | 1198 | GGGUUGCGUC | 247 |
| AGCAAACACT | | | | AGCAAACACU | |
| AGCTCTTGTT | 53 | HBVg_53 | 2842 | AGCUCUUGUU | 248 |
| CCCAAGAATA | | | | CCCAAGAAUA | |
| TGACATACTT | 54 | HBVg_54 | 992 | UGACAUACUU | 249 |
| TCCAATCAAT | | | | UCCAAUCAAU | |
| CAGATGAGAA | 55 | HBVg_55 | 1569 | CAGAUGAGAA | 250 |
| GGCACAGACG | | | | GGCACAGACG | |
| CCCCGCCTGT | 56 | HBVg_56 | 208 | CCCCGCCUGU | 251 |
| AACACGAGCA | | | | AACACGAGCA | |
| GGGTGGAGCC | 57 | HBVg_57 | 3072 | GGGUGGAGCC | 252 |
| CTCAGGCTCA | | | | CUCAGGCUCA | |
| ATTCCTTGGA | 58 | HBVg_58 | 2453 | AUUCCUUGGA | 253 |
| CTCATAAGGT | | | | CUCAUAAGGU | |
| TTTGTGGGTC | 59 | HBVg_59 | 2808 | UUUGUGGGUC | 254 |
| ACCATATTCT | | | | ACCAUAUUCU | |
| GTGAAAAAGT | 60 | HBVg_60 | 1828 | GUGAAAAAGU | 255 |
| TGCATGGTGC | | | | UGCAUGGUGC | |
| CCTGAACTGG | 61 | HBVg_61 | 78 | CCUGAACUGG | 256 |
| AGCCACCAGC | | | | AGCCACCAGC | |
| TCCTCTGCCG | 62 | HBVg_62 | 1253 | UCCUCUGCCG | 257 |
| ATCCATACTG | | | | AUCCAUACUG | |
| CGGCTAGGAG | 63 | HBVg_63 | 1288 | CGGCUAGGAG | 258 |
| TTCCGCAGTA | | | | UUCCGCAGUA | |
| AATGTCAACG | 64 | HBVg_64 | 1678 | AAUGUCAACG | 259 |
| ACCGACCTTG | | | | ACCGACCUUG | |
| GACCTTCGTC | 65 | HBVg_65 | 2403 | GACCUUCGUC | 260 |
| TGCGAGGCGA | | | | UGCGAGGCGA | |
| GTTGCCGGGC | 66 | HBVg_66 | 1162 | GUUGCCGGGC | 261 |
| AACGGGGTAA | | | | AACGGGGUAA | |
| GATTGAGACC | 67 | HBVg_67 | 2409 | GAUUGAGACC | 262 |
| TTCGTCTGCG | | | | UUCGUCUGCG | |
| AGGACCCCTG | 68 | HBVg_68 | 180 | AGGACCCCUG | 263 |
| CTCGTGTTAC | | | | CUCGUGUUAC | |
| TTTGAAGTAT | 69 | HBVg_69 | 1712 | UUUGAAGUAU | 264 |
| GCCTCAAGGT | | | | GCCUCAAGGU | |
| CCGCTTGTTT | 70 | HBVg_70 | 1285 | CCGCUUGUUU | 265 |
| TGCTCGCAGC | | | | UGCUCGCAGC | |
| TGCTAGGCTG | 71 | HBVg_71 | 1378 | UGCUAGGCUG | 266 |
| TGCTGCCAAC | | | | UGCUGCCAAC | |
| TGCCGATTGG | 72 | HBVg_72 | 3146 | UGCCGAUUGG | 267 |
| TGGAGGCAGG | | | | UGGAGGCAGG | |
| TCTTTGTACT | 73 | HBVg_73 | 1764 | UCUUUGUACU | 268 |
| AGGAGGCTGT | | | | AGGAGGCUGU | |
| CGTCCCGCGC | 74 | HBVg_74 | 1416 | CGUCCCGCGC | 269 |
| AGGATCCAGT | | | | AGGAUCCAGU | |
| AAAGCCCAAG | 75 | HBVg_75 | 627 | AAAGCCCAAG | 270 |
| ATGATGGGAT | | | | AUGAUGGGAU | |
| GCAGATGAGA | 76 | HBVg_76 | 1570 | GCAGAUGAGA | 271 |
| AGGCACAGAC | | | | AGGCACAGAC | |
| CGATTGGTGG | 77 | HBVg_77 | 3143 | CGAUUGGUGG | 272 |
| AGGCAGGAGG | | | | AGGCAGGAGG | |
| AGGAGGCTGT | 78 | HBVg_78 | 1774 | AGGAGGCUGU | 273 |
| AGGCATAAAT | | | | AGGCAUAAAU | |
| CCATGCCCCA | 79 | HBVg_79 | 1904 | CCAUGCCCCA | 274 |
| AAGCCACCCA | | | | AAGCCACCCA | |
| AGGTTGGGGA | 80 | HBVg_80 | 326 | AGGUUGGGGA | 275 |
| CTGCGAATTT | | | | CUGCGAAUUU | |
| AGACCTTCGT | 81 | HBVg_81 | 2404 | AGACCUUCGU | 276 |
| CTGCGAGGCG | | | | CUGCGAGGCG | |
| CCTGGAATTA | 82 | HBVg_82 | 489 | CCUGGAAUUA | 277 |
| GAGGACAAAC | | | | GAGGACAAAC | |
| TTTCAGTTAT | 83 | HBVg_83 | 728 | UUUCAGUUAU | 278 |
| ATGGATGATG | | | | AUGGAUGAUG | |
| GTAACACGAG | 84 | HBVg_84 | 200 | GUAACACGAG | 279 |
| CAGGGGTCCT | | | | CAGGGGUCCU | |
| CATCTTCTTG | 85 | HBVg_85 | 426 | CAUCUUCUUG | 280 |
| TTGGTTCTTC | | | | UUGGUUCUUC | |
| CGGGGAGACC | 86 | HBVg_86 | 1551 | CGGGGAGACC | 281 |
| GCGTAAAGAG | | | | GCGUAAAGAG | |
| CTAGACTCTG | 87 | HBVg_87 | 251 | CUAGACUCUG | 282 |
| TGGTATTGTG | | | | UGGUAUUGUG | |
| CCCTGCTCGT | 88 | HBVg_88 | 185 | CCCUGCUCGU | 283 |
| GTTACAGGCG | | | | GUUACAGGCG | |
| TACCACAGAG | 89 | HBVg_89 | 236 | UACCACAGAG | 284 |
| TCTAGACTCG | | | | UCUAGACUCG | |
| TCGCAAAATA | 90 | HBVg_90 | 626 | UCGCAAAAUA | 285 |
| CCTATGGGAG | | | | CCUAUGGGAG | |
| GTCTGTGCCT | 91 | HBVg_91 | 1550 | GUCUGUGCCU | 286 |
| TCTCATCTGC | | | | UCUCAUCUGC | |
| ACACGTAGCG | 92 | HBVg_92 | 2792 | ACACGUAGCG | 287 |
| CCTCATTTTG | | | | CCUCAUUUUG | |
| TTGGGGTTGA | 93 | HBVg_93 | 2990 | UUGGGGUUGA | 288 |
| GGTCCCAATC | | | | GGUCCCAAUC | |
| CCCCGAGACG | 94 | HBVg_94 | 1469 | CCCCGAGACG | 289 |
| GGTCGTCCGC | | | | GGUCGUCCGC | |
| CCTACGAACC | 95 | HBVg_95 | 708 | CCUACGAACC | 290 |
| ACTGAACAAA | | | | ACUGAACAAA | |
| TTACATACTC | 96 | HBVg_96 | 2747 | UUACAUACUC | 291 |
| TGTGGAAGGC | | | | UGUGGAAGGC | |
| ACCTCCTTTC | 97 | HBVg_97 | 1362 | ACCUCCUUUC | 292 |
| CATGGCTGCT | | | | CAUGGCUGCU | |
| GTTATCGCTG | 98 | HBVg_98 | 365 | GUUAUCGCUG | 293 |
| GATGTGTCTG | | | | GAUGUGUCUG | |
| AACATGAGAT | 99 | HBVg_99 | 1850 | AACAUGAGAU | 294 |
| GATTAGGCAG | | | | GAUUAGGCAG | |
| ACTTCTCTCA | 100 | HBVg_100 | 262 | ACUUCUCUCA | 295 |
| ATTTTCTAGG | | | | AUUUUCUAGG | |

TABLE 5
Target site sequences and gRNA spacers with
70-90% HBV genomic conservation and up to
2 mismatches (HBV2)

| Target | | | | | RNA |
|---|---|---|---|---|---|
| Site | | | Median | | spac- |
| (proto- | Target | Se- | HBV | gRNA | er |
| spacer) | SEQ | quence | posi- | spacer | SEQ |
| sequence | ID | name | tion | equence | ID |
| CACTTTCTCG | 101 | HBVg_ | 1091 | CACUUUCUCG | 296 |
| CCAACTTACA | | 101 | | CCAACUUACA | |
| CATAAGGTGG | 102 | HBVg_ | 2465 | CAUAAGGUGG | 297 |
| GAAACTTTAC | | 102 | | GAAACUUUAC | |
| CCAAACCTCG | 103 | HBVg_ | 2863 | CCAAACCUCG | 298 |
| AAAAGGCATG | | 103 | | AAAAGGCAUG | |
| ATAGAAGGAA | 104 | HBVg_ | 1980 | AUAGAAGGAA | 299 |
| AGAAGTCAGA | | 104 | | AGAAGUCAGA | |
| GCTGCTCCTT | 105 | HBVg_ | 1017 | GCUGCUCCUU | 300 |
| TTACACAATG | | 105 | | UUACACAAUG | |
| GAAGCGAAGT | 106 | HBVg_ | 1592 | GAAGCGAAGU | 301 |
| GCACACGGTC | | 106 | | GCACACGGUC | |
| GGATCATCAA | 107 | HBVg_ | 487 | GGAUCAUCAA | 302 |
| CCACCAGCAC | | 107 | | CCACCAGCAC | |
| GAGCCAAGAG | 108 | HBVg_ | 673 | GAGCCAAGAG | 303 |
| AAACGGACTG | | 108 | | AAACGGACUG | |
| CTTCACCTCT | 109 | HBVg_ | 1588 | CUUCACCUCU | 304 |
| GCACGTCGCA | | 109 | | GCACGUCGCA | |
| ACAATGTTCC | 110 | HBVg_ | 2044 | ACAAUGUUCC | 305 |
| GGAGACTCTA | | 110 | | GGAGACUCUA | |
| TCCGCGGGAT | 111 | HBVg_ | 1454 | UCCGCGGGAU | 306 |
| TCAGCGCCGA | | 111 | | UCAGCGCCGA | |
| TTAATGAGTG | 112 | HBVg_ | 1722 | UUAAUGAGUG | 307 |
| GGAGGAGTTG | | 112 | | GGAGGAGUUG | |
| CCAACTCAAA | 113 | HBVg_ | 2953 | CCAACUCAAA | 308 |
| CAATCCAGAT | | 113 | | CAAUCCAGAU | |
| GCTGCCAACT | 114 | HBVg_ | 1389 | GCUGCCAACU | 309 |
| GGATCCTGCG | | 114 | | GGAUCCUGCG | |
| AGTCTTTGAA | 115 | HBVg_ | 1716 | AGUCUUUGAA | 310 |
| GTATGCCTCA | | 115 | | GUAUGCCUCA | |
| TCCTGACTGC | 116 | HBVg_ | 3153 | UCCUGACUGC | 311 |
| CGATTGGTGG | | 116 | | CGAUUGGUGG | |
| TCTTGTCCTC | 117 | HBVg_ | 343 | UCUUGUCCUC | 312 |
| CAATTTGTCC | | 117 | | CAAUUUGUCC | |
| CGATAACCAG | 118 | HBVg_ | 372 | CGAUAACCAG | 313 |
| GACAAATTGG | | 118 | | GACAAAUUGG | |
| ATTTGGAAGA | 119 | HBVg_ | 2123 | AUUUGGAAGA | 314 |
| TCCAGCATCC | | 119 | | UCCAGCAUCC | |
| CTGTTTGGCT | 120 | HBVg_ | 719 | CUGUUUGGCU | 315 |
| TTCAGTTATA | | 120 | | UUCAGUUAUA | |
| CTCCTCCTGC | 121 | HBVg_ | 3121 | CUCCUCCUGC | 316 |
| CTCCACCAAT | | 121 | | CUCCACCAAU | |
| GTCATCCTCA | 122 | HBVg_ | 3190 | GUCAUCCUCA | 317 |
| GGCCATGCAG | | 122 | | GGCCAUGCAG | |
| CTGCCGTTCC | 123 | HBVg_ | 1500 | CUGCCGUUCC | 318 |
| GGCCGACCAC | | 123 | | GGCCGACCAC | |
| CCTTCCTGAC | 124 | HBVg_ | 3156 | CCUUCCUGAC | 319 |
| TGCCGATTGG | | 124 | | UGCCGAUUGG | |
| ACCTGCACGA | 125 | HBVg_ | 520 | ACCUGCACGA | 320 |
| CTCCTGCTCA | | 125 | | CUCCUGCUCA | |
| GGCCTGTATT | 126 | HBVg_ | 43 | GGCCUGUAUU | 321 |
| TTCCTGCTGG | | 126 | | UUCCUGCUGG | |
| AACATAGAGG | 127 | HBVg_ | 555 | AACAUAGAGG | 322 |
| TTCCTTGAGC | | 127 | | UUCCUUGAGC | |
| TGCCGTTCCG | 128 | HBVg_ | 1501 | UGCCGUUCCG | 323 |
| GCCGACCACG | | 128 | | GCCGACCACG | |
| ATAGGCCATC | 129 | HBVg_ | 1218 | AUAGGCCAUC | 324 |
| AGCGCATGCG | | 129 | | AGCGCAUGCG | |
| GCCTCCACCA | 130 | HBVg_ | 3129 | GCCUCCACCA | 325 |
| ATCGGCAGTC | | 130 | | AUCGGCAGUC | |
| GTCCTTTGTT | 131 | HBVg_ | 1415 | GUCCUUUGUU | 326 |
| TACGTCCCGT | | 131 | | UACGUCCCGU | |
| TGGGAACAAG | 132 | HBVg_ | 2828 | UGGGAACAAG | 327 |
| AGCTACAGCA | | 132 | | AGCUACAGCA | |
| CTGTAAACAG | 133 | HBVg_ | 958 | CUGUAAACAG | 328 |
| GCCTATTGAT | | 133 | | GCCUAUUGAU | |
| GTCGCAGAAG | 134 | HBVg_ | 2414 | GUCGCAGAAG | 329 |
| ATCTCAATCT | | 134 | | AUCUCAAUCU | |
| CTGCCTTCCT | 135 | HBVg_ | 3159 | CUGCCUUCCU | 330 |
| GACTGCCGAT | | 135 | | GACUGCCGAU | |
| ACTACTAATT | 136 | HBVg_ | 2157 | ACUACUAAUU | 331 |
| CCCTGGATGC | | 136 | | CCCUGGAUGC | |
| CACATTTCTT | 137 | HBVg_ | 2209 | CACAUUUCUU | 332 |
| GCCTTACTTT | | 137 | | GCCUUACUUU | |
| GGATGACTGT | 138 | HBVg_ | 3197 | GGAUGACUGU | 333 |
| CTCTTAGAGG | | 138 | | CUCUUAGAGG | |
| GCTATGCCTC | 139 | HBVg_ | 417 | GCUAUGCCUC | 334 |
| ATCTTCTTGT | | 139 | | AUCUUCUUGU | |
| CCCGTCGGCG | 140 | HBVg_ | 1430 | CCCGUCGGCG | 335 |
| CTGAATCCCG | | 140 | | CUGAAUCCCG | |
| TAGTATTCCT | 141 | HBVg_ | 2449 | UAGUAUUCCU | 336 |
| TGGACTCATA | | 141 | | UGGACUCAUA | |
| AGGTAGGAGC | 142 | HBVg_ | 3016 | AGGUAGGAGC | 337 |
| GGGAGCATTC | | 142 | | GGGAGCAUUC | |
| TCTTTTGGGG | 143 | HBVg_ | 3065 | UCUUUUGGGG | 338 |
| TGGAGCCCTC | | 143 | | UGGAGCCCUC | |
| TCAGTATGCC | 144 | HBVg_ | 3103 | UCAGUAUGCC | 339 |
| CTGAGCCTGA | | 144 | | CUGAGCCUGA | |
| TTTAATGAGT | 145 | HBVg_ | 1721 | UUUAAUGAGU | 340 |
| GGGAGGAGTT | | 145 | | GGGAGGAGUU | |
| CTCCCTCGCC | 146 | HBVg_ | 2378 | CUCCCUCGCC | 341 |
| TCGCAGACGA | | 146 | | UCGCAGACGA | |
| GATAAGATAG | 147 | HBVg_ | 2322 | GAUAAGAUAG | 342 |
| GGGCATTTGG | | 147 | | GGGCAUUUGG | |
| CCGCGGGATT | 148 | HBVg_ | 1453 | CCGCGGGAUU | 343 |
| CAGCGCCGAC | | 148 | | CAGCGCCGAC | |
| CAGCGATAAC | 149 | HBVg_ | 375 | CAGCGAUAAC | 344 |
| CAGGACAAAT | | 149 | | CAGGACAAAU | |
| CAGGTAGGAG | 150 | HBVg_ | 3021 | CAGGUAGGAG | 345 |
| TGGGAGCATT | | 150 | | UGGGAGCAUU | |
| GTTTAATGAG | 151 | HBVg_ | 1720 | GUUUAAUGAG | 346 |
| TGGGAGGAGT | | 151 | | UGGGAGGAGU | |
| TGGTGAGTGA | 152 | HBVg_ | 340 | UGGUGAGUGA | 347 |
| TTGGAGGTTG | | 152 | | UUGGAGGUUG | |
| TAATGAGTGG | 153 | HBVg_ | 1723 | UAAUGAGUGG | 348 |
| GAGGAGTTGG | | 153 | | GAGGAGUUGG | |
| ACTACATGTT | 154 | HBVg_ | 2719 | ACUACAUGUU | 349 |
| CTGGATAATA | | 154 | | CUGGAUAAUA | |
| GGCATAGCAG | 155 | HBVg_ | 425 | GGCAUAGCAG | 350 |
| CAGGATGAAG | | 155 | | CAGGAUGAAG | |
| GTTGATAAGA | 156 | HBVg_ | 2325 | GUUGAUAAGA | 351 |
| TAGGGGCATT | | 156 | | UAGGGGCAUU | |
| TCAACGAATT | 157 | HBVg_ | 989 | UCAACGAAUU | 352 |
| GTGGGTCTTT | | 157 | | GUGGGUCUUU | |
| TATGGATGAT | 158 | HBVg_ | 737 | UAUGGAUGAU | 353 |
| GTGGTATTGG | | 158 | | GUGGUAUUGG | |
| CAACGAATTG | 159 | HBVg_ | 990 | CAACGAAUUG | 354 |
| TGGGTCTTTT | | 159 | | UGGGUCUUUU | |
| CATTTGTTCA | 160 | HBVg_ | 686 | CAUUUGUUCA | 355 |
| GTGGTTCGTA | | 160 | | GUGGUUCGUA | |
| CGTCTAACAA | 161 | HBVg_ | 2352 | CGUCUAACAA | 356 |
| CAGTAGTTTC | | 161 | | CAGUAGUUUC | |
| TGCCTGAGTG | 162 | HBVg_ | 2070 | UGCCUGAGUG | 357 |
| CTGTATGGTG | | 162 | | CUGUAUGGUG | |
| GCCCCGAGAC | 163 | HBVg_ | 1470 | GCCCCGAGAC | 358 |
| GGGTCGTCCG | | 163 | | GGGUCGUCCG | |
| GACTGCCGAT | 164 | HBVg_ | 3149 | GACUGCCGAU | 359 |
| TGGTGGAGGC | | 164 | | UGGUGGAGGC | |
| TATATGGATG | 165 | HBVg_ | 735 | UAUAUGGAUG | 360 |
| ATGTGGTATT | | 165 | | AUGUGGUAUU | |
| CTTGAGTATT | 166 | HBVg_ | 2245 | CUUGAGUAUU | 361 |
| TGGTGTCTTT | | 166 | | UGGUGUCUUU | |
| GATCTGGTGG | 167 | HBVg_ | 1637 | GAUCUGGUGG | 362 |
| GCGTTCACGG | | 167 | | GCGUUCACGG | |
| AGACTGGGAG | 168 | HBVg_ | 1726 | AGACUGGGAG | 363 |
| GAGTTGGGGG | | 168 | | GAGUUGGGGG | |
| AGTCCTCTTA | 169 | HBVg_ | 1664 | AGUCCUCUUA | 364 |
| TGTAAGACCT | | 169 | | UGUAAGACCU | |
| CTCAAGATGT | 170 | HBVg_ | 783 | CUCAAGAUGU | 365 |
| TGTACAGACT | | 170 | | UGUACAGACU | |
| GGGAACAAGA | 171 | HBVg_ | 2829 | GGGAACAAGA | 366 |
| GCTACAGCAT | | 171 | | GCUACAGCAU | |
| TCGCAGAAGA | 172 | HBVg_ | 2415 | UCGCAGAAGA | 367 |
| TCTCAATCTC | | 172 | | UCUCAAUCUC | |
| GGGGTGGAGC | 173 | HBVg_ | 3071 | GGGGUGGAGC | 368 |
| CCTCAGGCTC | | 173 | | CCUCAGGCUC | |
| TATTCCTTGG | 174 | HBVg_ | 2452 | UAUUCCUUGG | 369 |
| ACTCATAAGG | | 174 | | ACUCAUAAGG | |
| TCTAAGAGAC | 175 | HBVg_ | 3179 | UCUAAGAGAC | 370 |
| AGTCATCCTC | | 175 | | AGUCAUCCUC | |
| CAACTCAAAC | 176 | HBVg_ | 2954 | CAACUCAAAC | 371 |
| AATCCAGATT | | 176 | | AAUCCAGAUU | |
| AAACAAAGGA | 177 | HBVg_ | 1426 | AAACAAAGGA | 372 |
| CGTCCCGCGC | | 177 | | CGUCCCGCGC | |
| CTGCCAACTG | 178 | HBVg_ | 1390 | CUGCCAACUG | 373 |
| GATCCTGCGC | | 178 | | GAUCCUGCGC | |
| GAAGCTCCAA | 179 | HBVg_ | 1935 | GAAGCUCCAA | 374 |
| ATTCTTTATA | | 179 | | AUUCUUUAUA | |
| GTCAGTATGC | 180 | HBVg_ | 3104 | GUCAGUAUGC | 375 |
| CCTGAGCCTG | | 180 | | CCUGAGCCUG | |
| TTTCCCACCT | 181 | HBVg_ | 2479 | UUUCCCACCU | 376 |
| TATGAGTCCA | | 181 | | UAUGAGUCCA | |
| ACAAGAGGTT | 182 | HBVg_ | 349 | ACAAGAGGUU | 377 |
| GGTGAGTGAT | | 182 | | GGUGAGUGAU | |
| GAAAGCCCAA | 183 | HBVg_ | 628 | GAAAGCCCAA | 378 |
| GATGATGGGA | | 183 | | GAUGAUGGGA | |
| AGGTTCCACG | 184 | HBVg_ | 1246 | AGGUUCCACG | 379 |
| CATGCGCTGA | | 184 | | CAUGCGCUGA | |
| TTGGTGAGTG | 185 | HBVg_ | 341 | UUGGUGAGUG | 380 |
| ATTGGAGGTT | | 185 | | AUUGGAGGUU | |
| AGAGCTACAG | 186 | HBVg_ | 2836 | AGAGCUACAG | 381 |
| CATGGGAGGT | | 186 | | CAUGGGAGGU | |
| ATATGGATGA | 187 | HBVg_ | 736 | AUAUGGAUGA | 382 |
| TGTGGTATTG | | 187 | | UGUGGUAUUG | |
| CCATTTGTTC | 188 | HBVg_ | 685 | CCAUUUGUUC | 383 |
| AGTGGTTCGT | | 188 | | AGUGGUUCGU | |
| TTATATGGAT | 189 | HBVg_ | 734 | UUAUAUGGAU | 384 |
| GATGTGGTAT | | 189 | | GAUGUGGUAU | |
| GGAGTGGGAG | 190 | HBVg_ | 3021 | GGAGUGGGAG | 385 |
| CATTCGGGCC | | 190 | | CAUUCGGGCC | |
| ATTTGGTGTC | 191 | HBVg_ | 2252 | AUUUGGUGUC | 386 |
| TTTTGGAGTG | | 191 | | UUUUGGAGUG | |
| CACAGAAAGG | 192 | HBVg_ | 1124 | CACAGAAAGG | 387 |
| CCTTGTAAGT | | 192 | | CCUUGUAAGU | |
| ACCAATTTTC | 193 | HBVg_ | 801 | ACCAAUUUUC | 388 |
| TTTTGTCTTT | | 193 | | UUUUGUCUUU | |
| AGGTTAATGG | 194 | HBVg_ | 1754 | AGGUUAAUGG | 389 |
| TCTTTGTACT | | 194 | | UCUUUGUACU | |
| TACCAATTTT | 195 | HBVg_ | 800 | UACCAAUUUU | 390 |
| CTTTTGTCTT | | 195 | | CUUUUGUCUU | |

TABLE 6
Gene-targeting gRNAs

| Sequence | | SEQ |
|---|---|---|
| name | Gene-targeting gRNAs | ID |
| HBVg_1 | CCCUAUCUUAUCAACACUUCGUUUAAGAGCUAUGCUGGAAACAGCAUAGC | 391 |
| | AAGUUUAAAUAAGGCUAGUCCGUUAUCAACUUGAAAAAGUGGCACCGAGU | |
| | CGGUGC | |
| HBVg_2 | GCAGAGGUGAAAAAGUUGCAGUUUAAGAGCUAUGCUGGAAACAGCAUAGC | 392 |
| | AAGUUUAAAUAAGGCUAGUCCGUUAUCAACUUGAAAAAGUGGCACCGAGU | |
| | CGGUGC | |
| HBVg_3 | UGGACUUCUCUCAAUUUUCUGUUUAAGAGCUAUGCUGGAAACAGCAUAGC | 393 |
| | AAGUUUAAAUAAGGCUAGUCCGUUAUCAACUUGAAAAAGUGGCACCGAGU | |
| | CGGUGC | |
| HBVg_4 | ACCCCGCCUGUAACACGAGCGUUUAAGAGCUAUGCUGGAAACAGCAUAGC | 394 |
| | AAGUUUAAAUAAGGCUAGUCCGUUAUCAACUUGAAAAAGUGGCACCGAGU | |
| | CGGUGC | |
| HBVg_5 | CCCGCCUGUAACACGAGCAGGUUUAAGAGCUAUGCUGGAAACAGCAUAGC | 395 |
| | AAGUUUAAAUAAGGCUAGUCCGUUAUCAACUUGAAAAAGUGGCACCGAGU | |
| | CGGUGC | |
| HBVg_6 | CACCACGAGUCUAGACUCUGGUUUAAGAGCUAUGCUGGAAACAGCAUAGC | 396 |
| | AAGUUUAAAUAAGGCUAGUCCGUUAUCAACUUGAAAAAGUGGCACCGAGU | |
| | CGGUGC | |
| HBVg_7 | GAGGUGAAGCGAAGUGCACAGUUUAAGAGCUAUGCUGGAAACAGCAUAGC | 397 |
| | AAGUUUAAAUAAGGCUAGUCCGUUAUCAACUUGAAAAAGUGGCACCGAGU | |
| | CGGUGC | |
| HBVg_8 | CCGGAAGUGUUGAUAAGAUAGUUUAAGAGCUAUGCUGGAAACAGCAUAGC | 398 |
| | AAGUUUAAAUAAGGCUAGUCCGUUAUCAACUUGAAAAAGUGGCACCGAGU | |
| | CGGUGC | |
| HBVg_9 | AGAAGAUGAGGCAUAGCAGCGUUUAAGAGCUAUGCUGGAAACAGCAUAGC | 399 |
| | AAGUUUAAAUAAGGCUAGUCCGUUAUCAACUUGAAAAAGUGGCACCGAGU | |
| | CGGUGC | |
| HBVg_10 | UCCGCAGUAUGGAUCGGCAGGUUUAAGAGCUAUGCUGGAAACAGCAUAGC | 400 |
| | AAGUUUAAAUAAGGCUAGUCCGUUAUCAACUUGAAAAAGUGGCACCGAGU | |
| | CGGUGC | |
| HBVg_11 | GGACUUCUCUCAAUUUUCUAGUUUAAGAGCUAUGCUGGAAACAGCAUAGC | 401 |
| | AAGUUUAAAUAAGGCUAGUCCGUUAUCAACUUGAAAAAGUGGCACCGAGU | |
| | CGGUGC | |
| HBVg_12 | CCACCCAAGGCACAGCUUGGGUUUAAGAGCUAUGCUGGAAACAGCAUAGC | 402 |
| | AAGUUUAAAUAAGGCUAGUCCGUUAUCAACUUGAAAAAGUGGCACCGAGU | |
| | CGGUGC | |
| HBVg_13 | AGAGAGGUGCGCCCCGUGGUGUUUAAGAGCUAUGCUGGAAACAGCAUAGC | 403 |
| | AAGUUUAAAUAAGGCUAGUCCGUUAUCAACUUGAAAAAGUGGCACCGAGU | |
| | CGGUGC | |
| HBVg_14 | GAUUGAGAUCUUCUGCGACGGUUUAAGAGCUAUGCUGGAAACAGCAUAGC | 404 |
| | AAGUUUAAAUAAGGCUAGUCCGUUAUCAACUUGAAAAAGUGGCACCGAGU | |
| | CGGUGC | |
| HBVg_15 | CAAGCCUCCAAGCUGUGCCUGUUUAAGAGCUAUGCUGGAAACAGCAUAGC | 405 |
| | AAGUUUAAAUAAGGCUAGUCCGUUAUCAACUUGAAAAAGUGGCACCGAGU | |
| | CGGUGC | |
| HBVg_16 | GGCGAGGGAGUUCUUCUUCUGUUUAAGAGCUAUGCUGGAAACAGCAUAGC | 406 |
| | AAGUUUAAAUAAGGCUAGUCCGUUAUCAACUUGAAAAAGUGGCACCGAGU | |
| | CGGUGC | |
| HBVg_17 | UCCGGAAGUGUUGAUAAGAUGUUUAAGAGCUAUGCUGGAAACAGCAUAGC | 407 |
| | AAGUUUAAAUAAGGCUAGUCCGUUAUCAACUUGAAAAAGUGGCACCGAGU | |
| | CGGUGC | |
| HBVg_18 | AAGCCACCCAAGGCACAGCUGUUUAAGAGCUAUGCUGGAAACAGCAUAGC | 408 |
| | AAGUUUAAAUAAGGCUAGUCCGUUAUCAACUUGAAAAAGUGGCACCGAGU | |
| | CGGUGC | |
| HBVg_19 | CCUCCAAGCUGUGCCUUGGGGUUUAAGAGCUAUGCUGGAAACAGCAUAGC | 409 |
| | AAGUUUAAAUAAGGCUAGUCCGUUAUCAACUUGAAAAAGUGGCACCGAGU | |
| | CGGUGC | |
| HBVg_20 | GUAAAGAGAGGUGCGCCCCGGUUUAAGAGCUAUGCUGGAAACAGCAUAGC | 410 |
| | AAGUUUAAAUAAGGCUAGUCCGUUAUCAACUUGAAAAAGUGGCACCGAGU | |
| | CGGUGC | |
| HBVg_21 | GGCAGAUGAGAAGGCACAGAGUUUAAGAGCUAUGCUGGAAACAGCAUAGC | 411 |
| | AAGUUUAAAUAAGGCUAGUCCGUUAUCAACUUGAAAAAGUGGCACCGAGU | |
| | CGGUGC | |
| HBVg_22 | AGGAGUUCCGCAGUAUGGAUGUUUAAGAGCUAUGCUGGAAACAGCAUAGC | 412 |
| | AAGUUUAAAUAAGGCUAGUCCGUUAUCAACUUGAAAAAGUGGCACCGAGU | |
| | CGGUGC | |
| HBVg_23 | GCUGUGCCUUGGGUGGCUUUGUUUAAGAGCUAUGCUGGAAACAGCAUAGC | 413 |
| | AAGUUUAAAUAAGGCUAGUCCGUUAUCAACUUGAAAAAGUGGCACCGAGU | |
| | CGGUGC | |
| HBVg_24 | ACCCCUGCUCGUGUUACAGGGUUUAAGAGCUAUGCUGGAAACAGCAUAGC | 414 |
| | AAGUUUAAAUAAGGCUAGUCCGUUAUCAACUUGAAAAAGUGGCACCGAGU | |
| | CGGUGC | |
| HBVg_25 | CGGAAGUGUUGAUAAGAUAGGUUUAAGAGCUAUGCUGGAAACAGCAUAGC | 415 |
| | AAGUUUAAAUAAGGCUAGUCCGUUAUCAACUUGAAAAAGUGGCACCGAGU | |
| | CGGUGC | |
| HBVg_26 | CCUGCUGGUGGCUCCAGUUCGUUUAAGAGCUAUGCUGGAAACAGCAUAGC | 416 |
| | AAGUUUAAAUAAGGCUAGUCCGUUAUCAACUUGAAAAAGUGGCACCGAGU | |
| | CGGUGC | |
| HBVg_27 | CGAGGGAGUUCUUCUUCUAGGUUUAAGAGCUAUGCUGGAAACAGCAUAGC | 417 |
| | AAGUUUAAAUAAGGCUAGUCCGUUAUCAACUUGAAAAAGUGGCACCGAGU | |
| | CGGUGC | |
| HBVg_28 | GGGGCGCACCUCUCUUUACGGUUUAAGAGCUAUGCUGGAAACAGCAUAGC | 418 |
| | AAGUUUAAAUAAGGCUAGUCCGUUAUCAACUUGAAAAAGUGGCACCGAGU | |
| | CGGUGC | |
| HBVg_29 | AGCUUGGAGGCUUGAACAGUGUUUAAGAGCUAUGCUGGAAACAGCAUAGC | 419 |
| | AAGUUUAAAUAAGGCUAGUCCGUUAUCAACUUGAAAAAGUGGCACCGAGU | |
| | CGGUGC | |
| HBVg_30 | AAGCCUCCAAGCUGUGCCUUGUUUAAGAGCUAUGCUGGAAACAGCAUAGC | 420 |
| | AAGUUUAAAUAAGGCUAGUCCGUUAUCAACUUGAAAAAGUGGCACCGAGU | |
| | CGGUGC | |
| HBVg_31 | CCCCUGCUCGUGUUACAGGCGUUUAAGAGCUAUGCUGGAAACAGCAUAGC | 421 |
| | AAGUUUAAAUAAGGCUAGUCCGUUAUCAACUUGAAAAAGUGGCACCGAGU | |
| | CGGUGC | |
| HBVg_32 | GCGAGGGAGUUCUUCUUCUAGUUUAAGAGCUAUGCUGGAAACAGCAUAGC | 422 |
| | AAGUUUAAAUAAGGCUAGUCCGUUAUCAACUUGAAAAAGUGGCACCGAGU | |
| | CGGUGC | |
| HBVg_33 | UACUAGUGCCAUUUGUUCAGGUUUAAGAGCUAUGCUGGAAACAGCAUAGC | 423 |
| | AAGUUUAAAUAAGGCUAGUCCGUUAUCAACUUGAAAAAGUGGCACCGAGU | |
| | CGGUGC | |
| HBVg_34 | GACUUCUCUCAAUUUUCUAGGUUUAAGAGCUAUGCUGGAAACAGCAUAGC | 424 |
| | AAGUUUAAAUAAGGCUAGUCCGUUAUCAACUUGAAAAAGUGGCACCGAGU | |
| | CGGUGC | |
| HBVg_35 | AUUGACCCGUAUAAAGAAUUGUUUAAGAGCUAUGCUGGAAACAGCAUAGC | 425 |
| | AAGUUUAAAUAAGGCUAGUCCGUUAUCAACUUGAAAAAGUGGCACCGAGU | |
| | CGGUGC | |
| HBVg_36 | ACCCAAAGACAAAAGAAAAUGUUUAAGAGCUAUGCUGGAAACAGCAUAGC | 426 |
| | AAGUUUAAAUAAGGCUAGUCCGUUAUCAACUUGAAAAAGUGGCACCGAGU | |
| | CGGUGC | |
| HBVg_37 | GUCCUCUUAUGUAAGACCUUGUUUAAGAGCUAUGCUGGAAACAGCAUAGC | 427 |
| | AAGUUUAAAUAAGGCUAGUCCGUUAUCAACUUGAAAAAGUGGCACCGAGU | |
| | CGGUGC | |
| HBVg_38 | UGAUCGGGAAAGAAUCCCAGGUUUAAGAGCUAUGCUGGAAACAGCAUAGC | 428 |
| | AAGUUUAAAUAAGGCUAGUCCGUUAUCAACUUGAAAAAGUGGCACCGAGU | |
| | CGGUGC | |
| HBVg_39 | UUUGCUGACGCAACCCCCACGUUUAAGAGCUAUGCUGGAAACAGCAUAGC | 429 |
| | AAGUUUAAAUAAGGCUAGUCCGUUAUCAACUUGAAAAAGUGGCACCGAGU | |
| | CGGUGC | |
| HBVg_40 | AUGAAUCUAGCCACCUGGGUGUUUAAGAGCUAUGCUGGAAACAGCAUAGC | 430 |
| | AAGUUUAAAUAAGGCUAGUCCGUUAUCAACUUGAAAAAGUGGCACCGAGU | |
| | CGGUGC | |
| HBVg_41 | GGUCUCCAUGCGACGUGCAGGUUUAAGAGCUAUGCUGGAAACAGCAUAGC | 431 |
| | AAGUUUAAAUAAGGCUAGUCCGUUAUCAACUUGAAAAAGUGGCACCGAGU | |
| | CGGUGC | |
| HBVg_42 | GGACUGAGGCCCACUCCCAUGUUUAAGAGCUAUGCUGGAAACAGCAUAGC | 432 |
| | AAGUUUAAAUAAGGCUAGUCCGUUAUCAACUUGAAAAAGUGGCACCGAGU | |
| | CGGUGC | |
| HBVg_43 | CACAGAGUCUAGACUCGUGGGUUUAAGAGCUAUGCUGGAAACAGCAUAGC | 433 |
| | AAGUUUAAAUAAGGCUAGUCCGUUAUCAACUUGAAAAAGUGGCACCGAGU | |
| | CGGUGC | |
| HBVg_44 | GAAGAACCAACAAGAAGAUGGUUUAAGAGCUAUGCUGGAAACAGCAUAGC | 434 |
| | AAGUUUAAAUAAGGCUAGUCCGUUAUCAACUUGAAAAAGUGGCACCGAGU | |
| | CGGUGC | |
| HBVg_45 | ACACGGUCCGGCAGAUGAGAGUUUAAGAGCUAUGCUGGAAACAGCAUAGC | 435 |
| | AAGUUUAAAUAAGGCUAGUCCGUUAUCAACUUGAAAAAGUGGCACCGAGU | |
| | CGGUGC | |
| HBVg_46 | GACAUGAACAUGAGAUGAUUGUUUAAGAGCUAUGCUGGAAACAGCAUAGC | 436 |
| | AAGUUUAAAUAAGGCUAGUCCGUUAUCAACUUGAAAAAGUGGCACCGAGU | |
| | CGGUGC | |
| HBVg_47 | GCAGCACAGCCUAGCAGCCAGUUUAAGAGCUAUGCUGGAAACAGCAUAGC | 437 |
| | AAGUUUAAAUAAGGCUAGUCCGUUAUCAACUUGAAAAAGUGGCACCGAGU | |
| | CGGUGC | |
| HBVg_48 | UCCUGGAAUUAGAGGACAAAGUUUAAGAGCUAUGCUGGAAACAGCAUAGC | 438 |
| | AAGUUUAAAUAAGGCUAGUCCGUUAUCAACUUGAAAAAGUGGCACCGAGU | |
| | CGGUGC | |
| HBVg_49 | GUCUUACAUAAGAGGACUCUGUUUAAGAGCUAUGCUGGAAACAGCAUAGC | 439 |
| | AAGUUUAAAUAAGGCUAGUCCGUUAUCAACUUGAAAAAGUGGCACCGAGU | |
| | CGGUGC | |
| HBVg_50 | UUGUGGGUCACCAUAUUCUUGUUUAAGAGCUAUGCUGGAAACAGCAUAGC | 440 |
| | AAGUUUAAAUAAGGCUAGUCCGUUAUCAACUUGAAAAAGUGGCACCGAGU | |
| | CGGUGC | |
| HBVg_51 | CGCAAAAUACCUAUGGGAGUGUUUAAGAGCUAUGCUGGAAACAGCAUAGC | 441 |
| | AAGUUUAAAUAAGGCUAGUCCGUUAUCAACUUGAAAAAGUGGCACCGAGU | |
| | CGGUGC | |
| HBVg_52 | GGGUUGCGUCAGCAAACACUGUUUAAGAGCUAUGCUGGAAACAGCAUAGC | 442 |
| | AAGUUUAAAUAAGGCUAGUCCGUUAUCAACUUGAAAAAGUGGCACCGAGU | |
| | CGGUGC | |
| HBVg_53 | AGCUCUUGUUCCCAAGAAUAGUUUAAGAGCUAUGCUGGAAACAGCAUAGC | 443 |
| | AAGUUUAAAUAAGGCUAGUCCGUUAUCAACUUGAAAAAGUGGCACCGAGU | |
| | CGGUGC | |
| HBVg_54 | UGACAUACUUUCCAAUCAAUGUUUAAGAGCUAUGCUGGAAACAGCAUAGC | 444 |
| | AAGUUUAAAUAAGGCUAGUCCGUUAUCAACUUGAAAAAGUGGCACCGAGU | |
| | CGGUGC | |
| HBVg_55 | CAGAUGAGAAGGCACAGACGGUUUAAGAGCUAUGCUGGAAACAGCAUAGC | 445 |
| | AAGUUUAAAUAAGGCUAGUCCGUUAUCAACUUGAAAAAGUGGCACCGAGU | |
| | CGGUGC | |
| HBVg_56 | CCCCGCCUGUAACACGAGCAGUUUAAGAGCUAUGCUGGAAACAGCAUAGC | 446 |
| | AAGUUUAAAUAAGGCUAGUCCGUUAUCAACUUGAAAAAGUGGCACCGAGU | |
| | CGGUGC | |
| HBVg_57 | GGGUGGAGCCCUCAGGCUCAGUUUAAGAGCUAUGCUGGAAACAGCAUAGC | 447 |
| | AAGUUUAAAUAAGGCUAGUCCGUUAUCAACUUGAAAAAGUGGCACCGAGU | |
| | CGGUGC | |
| HBVg_58 | AUUCCUUGGACUCAUAAGGUGUUUAAGAGCUAUGCUGGAAACAGCAUAGC | 448 |
| | AAGUUUAAAUAAGGCUAGUCCGUUAUCAACUUGAAAAAGUGGCACCGAGU | |
| | CGGUGC | |
| HBVg_59 | UUUGUGGGUCACCAUAUUCUGUUUAAGAGCUAUGCUGGAAACAGCAUAGC | 449 |
| | AAGUUUAAAUAAGGCUAGUCCGUUAUCAACUUGAAAAAGUGGCACCGAGU | |
| | CGGUGC | |
| HBVg_60 | GUGAAAAAGUUGCAUGGUGCGUUUAAGAGCUAUGCUGGAAACAGCAUAGC | 450 |
| | AAGUUUAAAUAAGGCUAGUCCGUUAUCAACUUGAAAAAGUGGCACCGAGU | |
| | CGGUGC | |
| HBVg_61 | CCUGAACUGGAGCCACCAGCGUUUAAGAGCUAUGCUGGAAACAGCAUAGC | 451 |
| | AAGUUUAAAUAAGGCUAGUCCGUUAUCAACUUGAAAAAGUGGCACCGAGU | |
| | CGGUGC | |
| HBVg_62 | UCCUCUGCCGAUCCAUACUGGUUUAAGAGCUAUGCUGGAAACAGCAUAGC | 452 |
| | AAGUUUAAAUAAGGCUAGUCCGUUAUCAACUUGAAAAAGUGGCACCGAGU | |
| | CGGUGC | |
| HBVg_63 | CGGCUAGGAGUUCCGCAGUAGUUUAAGAGCUAUGCUGGAAACAGCAUAGC | 453 |
| | AAGUUUAAAUAAGGCUAGUCCGUUAUCAACUUGAAAAAGUGGCACCGAGU | |
| | CGGUGC | |
| HBVg_64 | AAUGUCAACGACCGACCUUGGUUUAAGAGCUAUGCUGGAAACAGCAUAGC | 454 |
| | AAGUUUAAAUAAGGCUAGUCCGUUAUCAACUUGAAAAAGUGGCACCGAGU | |
| | CGGUGC | |
| HBVg_65 | GACCUUCGUCUGCGAGGCGAGUUUAAGAGCUAUGCUGGAAACAGCAUAGC | 455 |
| | AAGUUUAAAUAAGGCUAGUCCGUUAUCAACUUGAAAAAGUGGCACCGAGU | |
| | CGGUGC | |
| HBVg_66 | GUUGCCGGGCAACGGGGUAAGUUUAAGAGCUAUGCUGGAAACAGCAUAGC | 456 |
| | AAGUUUAAAUAAGGCUAGUCCGUUAUCAACUUGAAAAAGUGGCACCGAGU | |
| | CGGUGC | |
| HBVg_67 | GAUUGAGACCUUCGUCUGCGGUUUAAGAGCUAUGCUGGAAACAGCAUAGC | 457 |
| | AAGUUUAAAUAAGGCUAGUCCGUUAUCAACUUGAAAAAGUGGCACCGAGU | |
| | CGGUGC | |
| HBVg_68 | AGGACCCCUGCUCGUGUUACGUUUAAGAGCUAUGCUGGAAACAGCAUAGC | 458 |
| | AAGUUUAAAUAAGGCUAGUCCGUUAUCAACUUGAAAAAGUGGCACCGAGU | |
| | CGGUGC | |
| HBVg_69 | UUUGAAGUAUGCCUCAAGGUGUUUAAGAGCUAUGCUGGAAACAGCAUAGC | 459 |
| | AAGUUUAAAUAAGGCUAGUCCGUUAUCAACUUGAAAAAGUGGCACCGAGU | |
| | CGGUGC | |
| HBVg_70 | CCGCUUGUUUUGCUCGCAGCGUUUAAGAGCUAUGCUGGAAACAGCAUAGC | 460 |
| | AAGUUUAAAUAAGGCUAGUCCGUUAUCAACUUGAAAAAGUGGCACCGAGU | |
| | CGGUGC | |
| HBVg_71 | UGCUAGGCUGUGCUGCCAACGUUUAAGAGCUAUGCUGGAAACAGCAUAGC | 461 |
| | AAGUUUAAAUAAGGCUAGUCCGUUAUCAACUUGAAAAAGUGGCACCGAGU | |
| | CGGUGC | |
| HBVg_72 | UGCCGAUUGGUGGAGGCAGGGUUUAAGAGCUAUGCUGGAAACAGCAUAGC | 462 |
| | AAGUUUAAAUAAGGCUAGUCCGUUAUCAACUUGAAAAAGUGGCACCGAGU | |
| | CGGUGC | |
| HBVg_73 | UCUUUGUACUAGGAGGCUGUGUUUAAGAGCUAUGCUGGAAACAGCAUAGC | 463 |
| | AAGUUUAAAUAAGGCUAGUCCGUUAUCAACUUGAAAAAGUGGCACCGAGU | |
| | CGGUGC | |
| HBVg_74 | CGUCCCGCGCAGGAUCCAGUGUUUAAGAGCUAUGCUGGAAACAGCAUAGC | 464 |
| | AAGUUUAAAUAAGGCUAGUCCGUUAUCAACUUGAAAAAGUGGCACCGAGU | |
| | CGGUGC | |
| HBVg_75 | AAAGCCCAAGAUGAUGGGAUGUUUAAGAGCUAUGCUGGAAACAGCAUAGC | 465 |
| | AAGUUUAAAUAAGGCUAGUCCGUUAUCAACUUGAAAAAGUGGCACCGAGU | |
| | CGGUGC | |
| HBVg_76 | GCAGAUGAGAAGGCACAGACGUUUAAGAGCUAUGCUGGAAACAGCAUAGC | 466 |
| | AAGUUUAAAUAAGGCUAGUCCGUUAUCAACUUGAAAAAGUGGCACCGAGU | |
| | CGGUGC | |
| HBVg_77 | CGAUUGGUGGAGGCAGGAGGGUUUAAGAGCUAUGCUGGAAACAGCAUAGC | 467 |
| | AAGUUUAAAUAAGGCUAGUCCGUUAUCAACUUGAAAAAGUGGCACCGAGU | |
| | CGGUGC | |
| HBVg_78 | AGGAGGCUGUAGGCAUAAAUGUUUAAGAGCUAUGCUGGAAACAGCAUAGC | 468 |
| | AAGUUUAAAUAAGGCUAGUCCGUUAUCAACUUGAAAAAGUGGCACCGAGU | |
| | CGGUGC | |
| HBVg_79 | CCAUGCCCCAAAGCCACCCAGUUUAAGAGCUAUGCUGGAAACAGCAUAGC | 469 |
| | AAGUUUAAAUAAGGCUAGUCCGUUAUCAACUUGAAAAAGUGGCACCGAGU | |
| | CGGUGC | |
| HBVg_80 | AGGUUGGGGACUGCGAAUUUGUUUAAGAGCUAUGCUGGAAACAGCAUAGC | 470 |
| | AAGUUUAAAUAAGGCUAGUCCGUUAUCAACUUGAAAAAGUGGCACCGAGU | |
| | CGGUGC | |
| HBVg_81 | AGACCUUCGUCUGCGAGGCGGUUUAAGAGCUAUGCUGGAAACAGCAUAGC | 471 |
| | AAGUUUAAAUAAGGCUAGUCCGUUAUCAACUUGAAAAAGUGGCACCGAGU | |
| | CGGUGC | |
| HBVg_82 | CCUGGAAUUAGAGGACAAACGUUUAAGAGCUAUGCUGGAAACAGCAUAGC | 472 |
| | AAGUUUAAAUAAGGCUAGUCCGUUAUCAACUUGAAAAAGUGGCACCGAGU | |
| | CGGUGC | |
| HBVg_83 | UUUCAGUUAUAUGGAUGAUGGUUUAAGAGCUAUGCUGGAAACAGCAUAGC | 473 |
| | AAGUUUAAAUAAGGCUAGUCCGUUAUCAACUUGAAAAAGUGGCACCGAGU | |
| | CGGUGC | |
| HBVg_84 | GUAACACGAGCAGGGGUCCUGUUUAAGAGCUAUGCUGGAAACAGCAUAGC | 474 |
| | AAGUUUAAAUAAGGCUAGUCCGUUAUCAACUUGAAAAAGUGGCACCGAGU | |
| | CGGUGC | |
| HBVg_85 | CAUCUUCUUGUUGGUUCUUCGUUUAAGAGCUAUGCUGGAAACAGCAUAGC | 475 |
| | AAGUUUAAAUAAGGCUAGUCCGUUAUCAACUUGAAAAAGUGGCACCGAGU | |
| | CGGUGC | |
| HBVg_86 | CGGGGAGACCGCGUAAAGAGGUUUAAGAGCUAUGCUGGAAACAGCAUAGC | 476 |
| | AAGUUUAAAUAAGGCUAGUCCGUUAUCAACUUGAAAAAGUGGCACCGAGU | |
| | CGGUGC | |
| HBVg_87 | CUAGACUCUGUGGUAUUGUGGUUUAAGAGCUAUGCUGGAAACAGCAUAGC | 477 |
| | AAGUUUAAAUAAGGCUAGUCCGUUAUCAACUUGAAAAAGUGGCACCGAGU | |
| | CGGUGC | |
| HBVg_88 | CCCUGCUCGUGUUACAGGCGGUUUAAGAGCUAUGCUGGAAACAGCAUAGC | 478 |
| | AAGUUUAAAUAAGGCUAGUCCGUUAUCAACUUGAAAAAGUGGCACCGAGU | |
| | CGGUGC | |
| HBVg_89 | UACCACAGAGUCUAGACUCGGUUUAAGAGCUAUGCUGGAAACAGCAUAGC | 479 |
| | AAGUUUAAAUAAGGCUAGUCCGUUAUCAACUUGAAAAAGUGGCACCGAGU | |
| | CGGUGC | |
| HBVg_90 | UCGCAAAAUACCUAUGGGAGGUUUAAGAGCUAUGCUGGAAACAGCAUAGC | 480 |
| | AAGUUUAAAUAAGGCUAGUCCGUUAUCAACUUGAAAAAGUGGCACCGAGU | |
| | CGGUGC | |
| HBVg_91 | GUCUGUGCCUUCUCAUCUGCGUUUAAGAGCUAUGCUGGAAACAGCAUAGC | 481 |
| | AAGUUUAAAUAAGGCUAGUCCGUUAUCAACUUGAAAAAGUGGCACCGAGU | |
| | CGGUGC | |
| HBVg_92 | ACACGUAGCGCCUCAUUUUGGUUUAAGAGCUAUGCUGGAAACAGCAUAGC | 482 |
| | AAGUUUAAAUAAGGCUAGUCCGUUAUCAACUUGAAAAAGUGGCACCGAGU | |
| | CGGUGC | |
| HBVg_93 | UUGGGGUUGAGGUCCCAAUCGUUUAAGAGCUAUGCUGGAAACAGCAUAGC | 483 |
| | AAGUUUAAAUAAGGCUAGUCCGUUAUCAACUUGAAAAAGUGGCACCGAGU | |
| | CGGUGC | |
| HBVg_94 | CCCCGAGACGGGUCGUCCGCGUUUAAGAGCUAUGCUGGAAACAGCAUAGC | 484 |
| | AAGUUUAAAUAAGGCUAGUCCGUUAUCAACUUGAAAAAGUGGCACCGAGU | |
| | CGGUGC | |
| HBVg_95 | CCUACGAACCACUGAACAAAGUUUAAGAGCUAUGCUGGAAACAGCAUAGC | 485 |
| | AAGUUUAAAUAAGGCUAGUCCGUUAUCAACUUGAAAAAGUGGCACCGAGU | |
| | CGGUGC | |
| HBVg_96 | UUACAUACUCUGUGGAAGGCGUUUAAGAGCUAUGCUGGAAACAGCAUAGC | 486 |
| | AAGUUUAAAUAAGGCUAGUCCGUUAUCAACUUGAAAAAGUGGCACCGAGU | |
| | CGGUGC | |
| HBVg_97 | ACCUCCUUUCCAUGGCUGCUGUUUAAGAGCUAUGCUGGAAACAGCAUAGC | 487 |
| | AAGUUUAAAUAAGGCUAGUCCGUUAUCAACUUGAAAAAGUGGCACCGAGU | |
| | CGGUGC | |
| HBVg_98 | GUUAUCGCUGGAUGUGUCUGGUUUAAGAGCUAUGCUGGAAACAGCAUAGC | 488 |
| | AAGUUUAAAUAAGGCUAGUCCGUUAUCAACUUGAAAAAGUGGCACCGAGU | |
| | CGGUGC | |
| HBVg_99 | AACAUGAGAUGAUUAGGCAGGUUUAAGAGCUAUGCUGGAAACAGCAUAGC | 489 |
| | AAGUUUAAAUAAGGCUAGUCCGUUAUCAACUUGAAAAAGUGGCACCGAGU | |
| | CGGUGC | |
| HBVg_100 | ACUUCUCUCAAUUUUCUAGGGUUUAAGAGCUAUGCUGGAAACAGCAUAGC | 490 |
| | AAGUUUAAAUAAGGCUAGUCCGUUAUCAACUUGAAAAAGUGGCACCGAGU | |
| | CGGUGC | |
| HBVg_101 | CACUUUCUCGCCAACUUACAGUUUAAGAGCUAUGCUGGAAACAGCAUAGC | 491 |
| | AAGUUUAAAUAAGGCUAGUCCGUUAUCAACUUGAAAAAGUGGCACCGAGU | |
| | CGGUGC | |
| HBVg_102 | CAUAAGGUGGGAAACUUUACGUUUAAGAGCUAUGCUGGAAACAGCAUAGC | 492 |
| | AAGUUUAAAUAAGGCUAGUCCGUUAUCAACUUGAAAAAGUGGCACCGAGU | |
| | CGGUGC | |
| HBVg_103 | CCAAACCUCGAAAAGGCAUGGUUUAAGAGCUAUGCUGGAAACAGCAUAGC | 493 |
| | AAGUUUAAAUAAGGCUAGUCCGUUAUCAACUUGAAAAAGUGGCACCGAGU | |
| | CGGUGC | |
| HBVg_104 | AUAGAAGGAAAGAAGUCAGAGUUUAAGAGCUAUGCUGGAAACAGCAUAGC | 494 |
| | AAGUUUAAAUAAGGCUAGUCCGUUAUCAACUUGAAAAAGUGGCACCGAGU | |
| | CGGUGC | |
| HBVg_105 | GCUGCUCCUUUUACACAAUGGUUUAAGAGCUAUGCUGGAAACAGCAUAGC | 495 |
| | AAGUUUAAAUAAGGCUAGUCCGUUAUCAACUUGAAAAAGUGGCACCGAGU | |
| | CGGUGC | |
| HBVg_106 | GAAGCGAAGUGCACACGGUCGUUUAAGAGCUAUGCUGGAAACAGCAUAGC | 496 |
| | AAGUUUAAAUAAGGCUAGUCCGUUAUCAACUUGAAAAAGUGGCACCGAGU | |
| | CGGUGC | |
| HBVg_107 | GGAUCAUCAACCACCAGCACGUUUAAGAGCUAUGCUGGAAACAGCAUAGC | 497 |
| | AAGUUUAAAUAAGGCUAGUCCGUUAUCAACUUGAAAAAGUGGCACCGAGU | |
| | CGGUGC | |
| HBVg_108 | GAGCCAAGAGAAACGGACUGGUUUAAGAGCUAUGCUGGAAACAGCAUAGC | 498 |
| | AAGUUUAAAUAAGGCUAGUCCGUUAUCAACUUGAAAAAGUGGCACCGAGU | |
| | CGGUGC | |
| HBVg_109 | CUUCACCUCUGCACGUCGCAGUUUAAGAGCUAUGCUGGAAACAGCAUAGC | 499 |
| | AAGUUUAAAUAAGGCUAGUCCGUUAUCAACUUGAAAAAGUGGCACCGAGU | |
| | CGGUGC | |
| HBVg_110 | ACAAUGUUCCGGAGACUCUAGUUUAAGAGCUAUGCUGGAAACAGCAUAGC | 500 |
| | AAGUUUAAAUAAGGCUAGUCCGUUAUCAACUUGAAAAAGUGGCACCGAGU | |
| | CGGUGC | |
| HBVg_111 | UCCGCGGGAUUCAGCGCCGAGUUUAAGAGCUAUGCUGGAAACAGCAUAGC | 501 |
| | AAGUUUAAAUAAGGCUAGUCCGUUAUCAACUUGAAAAAGUGGCACCGAGU | |
| | CGGUGC | |
| HBVg_112 | UUAAUGAGUGGGAGGAGUUGGUUUAAGAGCUAUGCUGGAAACAGCAUAG | 502 |
| | CAAGUUUAAAUAAGGCUAGUCCGUUAUCAACUUGAAAAAGUGGCACCGAG | |
| | UCGGUGC | |
| HBVg_113 | CCAACUCAAACAAUCCAGAUGUUUAAGAGCUAUGCUGGAAACAGCAUAGC | 503 |
| | AAGUUUAAAUAAGGCUAGUCCGUUAUCAACUUGAAAAAGUGGCACCGAGU | |
| | CGGUGC | |
| HBVg_114 | GCUGCCAACUGGAUCCUGCGGUUUAAGAGCUAUGCUGGAAACAGCAUAGC | 504 |
| | AAGUUUAAAUAAGGCUAGUCCGUUAUCAACUUGAAAAAGUGGCACCGAGU | |
| | CGGUGC | |
| HBVg_115 | AGUCUUUGAAGUAUGCCUCAGUUUAAGAGCUAUGCUGGAAACAGCAUAGC | 505 |
| | AAGUUUAAAUAAGGCUAGUCCGUUAUCAACUUGAAAAAGUGGCACCGAGU | |
| | CGGUGC | |
| HBVg_116 | UCCUGACUGCCGAUUGGUGGGUUUAAGAGCUAUGCUGGAAACAGCAUAGC | 506 |
| | AAGUUUAAAUAAGGCUAGUCCGUUAUCAACUUGAAAAAGUGGCACCGAGU | |
| | CGGUGC | |
| HBVg_117 | UCUUGUCCUCCAAUUUGUCCGUUUAAGAGCUAUGCUGGAAACAGCAUAGC | 507 |
| | AAGUUUAAAUAAGGCUAGUCCGUUAUCAACUUGAAAAAGUGGCACCGAGU | |
| | CGGUGC | |
| HBVg_118 | CGAUAACCAGGACAAAUUGGGUUUAAGAGCUAUGCUGGAAACAGCAUAGC | 508 |
| | AAGUUUAAAUAAGGCUAGUCCGUUAUCAACUUGAAAAAGUGGCACCGAGU | |
| | CGGUGC | |
| HBVg_119 | AUUUGGAAGAUCCAGCAUCCGUUUAAGAGCUAUGCUGGAAACAGCAUAGC | 509 |
| | AAGUUUAAAUAAGGCUAGUCCGUUAUCAACUUGAAAAAGUGGCACCGAGU | |
| | CGGUGC | |
| HBVg_120 | CUGUUUGGCUUUCAGUUAUAGUUUAAGAGCUAUGCUGGAAACAGCAUAGC | 510 |
| | AAGUUUAAAUAAGGCUAGUCCGUUAUCAACUUGAAAAAGUGGCACCGAGU | |
| | CGGUGC | |
| HBVg_121 | CUCCUCCUGCCUCCACCAAUGUUUAAGAGCUAUGCUGGAAACAGCAUAGC | 511 |
| | AAGUUUAAAUAAGGCUAGUCCGUUAUCAACUUGAAAAAGUGGCACCGAGU | |
| | CGGUGC | |
| HBVg_122 | GUCAUCCUCAGGCCAUGCAGGUUUAAGAGCUAUGCUGGAAACAGCAUAGC | 512 |
| | AAGUUUAAAUAAGGCUAGUCCGUUAUCAACUUGAAAAAGUGGCACCGAGU | |
| | CGGUGC | |
| HBVg_123 | CUGCCGUUCCGGCCGACCACGUUUAAGAGCUAUGCUGGAAACAGCAUAGC | 513 |
| | AAGUUUAAAUAAGGCUAGUCCGUUAUCAACUUGAAAAAGUGGCACCGAGU | |
| | CGGUGC | |
| HBVg_124 | CCUUCCUGACUGCCGAUUGGGUUUAAGAGCUAUGCUGGAAACAGCAUAGC | 514 |
| | AAGUUUAAAUAAGGCUAGUCCGUUAUCAACUUGAAAAAGUGGCACCGAGU | |
| | CGGUGC | |
| HBVg_125 | ACCUGCACGACUCCUGCUCAGUUUAAGAGCUAUGCUGGAAACAGCAUAGC | 515 |
| | AAGUUUAAAUAAGGCUAGUCCGUUAUCAACUUGAAAAAGUGGCACCGAGU | |
| | CGGUGC | |
| HBVg_126 | GGCCUGUAUUUUCCUGCUGGGUUUAAGAGCUAUGCUGGAAACAGCAUAGC | 516 |
| | AAGUUUAAAUAAGGCUAGUCCGUUAUCAACUUGAAAAAGUGGCACCGAGU | |
| | CGGUGC | |
| HBVg_127 | AACAUAGAGGUUCCUUGAGCGUUUAAGAGCUAUGCUGGAAACAGCAUAGC | 517 |
| | AAGUUUAAAUAAGGCUAGUCCGUUAUCAACUUGAAAAAGUGGCACCGAGU | |
| | CGGUGC | |
| HBVg_128 | UGCCGUUCCGGCCGACCACGGUUUAAGAGCUAUGCUGGAAACAGCAUAGC | 518 |
| | AAGUUUAAAUAAGGCUAGUCCGUUAUCAACUUGAAAAAGUGGCACCGAGU | |
| | CGGUGC | |
| HBVg_129 | AUAGGCCAUCAGCGCAUGCGGUUUAAGAGCUAUGCUGGAAACAGCAUAGC | 519 |
| | AAGUUUAAAUAAGGCUAGUCCGUUAUCAACUUGAAAAAGUGGCACCGAGU | |
| | CGGUGC | |
| HBVg_130 | GCCUCCACCAAUCGGCAGUCGUUUAAGAGCUAUGCUGGAAACAGCAUAGC | 520 |
| | AAGUUUAAAUAAGGCUAGUCCGUUAUCAACUUGAAAAAGUGGCACCGAGU | |
| | CGGUGC | |
| HBVg_131 | GUCCUUUGUUUACGUCCCGUGUUUAAGAGCUAUGCUGGAAACAGCAUAGC | 521 |
| | AAGUUUAAAUAAGGCUAGUCCGUUAUCAACUUGAAAAAGUGGCACCGAGU | |
| | CGGUGC | |
| HBVg_132 | UGGGAACAAGAGCUACAGCAGUUUAAGAGCUAUGCUGGAAACAGCAUAGC | 522 |
| | AAGUUUAAAUAAGGCUAGUCCGUUAUCAACUUGAAAAAGUGGCACCGAGU | |
| | CGGUGC | |
| HBVg_133 | CUGUAAACAGGCCUAUUGAUGUUUAAGAGCUAUGCUGGAAACAGCAUAGC | 523 |
| | AAGUUUAAAUAAGGCUAGUCCGUUAUCAACUUGAAAAAGUGGCACCGAGU | |
| | CGGUGC | |
| HBVg_134 | GUCGCAGAAGAUCUCAAUCUGUUUAAGAGCUAUGCUGGAAACAGCAUAGC | 524 |
| | AAGUUUAAAUAAGGCUAGUCCGUUAUCAACUUGAAAAAGUGGCACCGAGU | |
| | CGGUGC | |
| HBVg_135 | CUGCCUUCCUGACUGCCGAUGUUUAAGAGCUAUGCUGGAAACAGCAUAGC | 525 |
| | AAGUUUAAAUAAGGCUAGUCCGUUAUCAACUUGAAAAAGUGGCACCGAGU | |
| | CGGUGC | |
| HBVg_136 | ACUACUAAUUCCCUGGAUGCGUUUAAGAGCUAUGCUGGAAACAGCAUAGC | 526 |
| | AAGUUUAAAUAAGGCUAGUCCGUUAUCAACUUGAAAAAGUGGCACCGAGU | |
| | CGGUGC | |
| HBVg_137 | CACAUUUCUUGCCUUACUUUGUUUAAGAGCUAUGCUGGAAACAGCAUAGC | 527 |
| | AAGUUUAAAUAAGGCUAGUCCGUUAUCAACUUGAAAAAGUGGCACCGAGU | |
| | CGGUGC | |
| HBVg_138 | GGAUGACUGUCUCUUAGAGGGUUUAAGAGCUAUGCUGGAAACAGCAUAGC | 528 |
| | AAGUUUAAAUAAGGCUAGUCCGUUAUCAACUUGAAAAAGUGGCACCGAGU | |
| | CGGUGC | |
| HBVg_139 | GCUAUGCCUCAUCUUCUUGUGUUUAAGAGCUAUGCUGGAAACAGCAUAGC | 529 |
| | AAGUUUAAAUAAGGCUAGUCCGUUAUCAACUUGAAAAAGUGGCACCGAGU | |
| | CGGUGC | |
| HBVg_140 | CCCGUCGGCGCUGAAUCCCGGUUUAAGAGCUAUGCUGGAAACAGCAUAGC | 530 |
| | AAGUUUAAAUAAGGCUAGUCCGUUAUCAACUUGAAAAAGUGGCACCGAGU | |
| | CGGUGC | |
| HBVg_141 | UAGUAUUCCUUGGACUCAUAGUUUAAGAGCUAUGCUGGAAACAGCAUAGC | 531 |
| | AAGUUUAAAUAAGGCUAGUCCGUUAUCAACUUGAAAAAGUGGCACCGAGU | |
| | CGGUGC | |
| HBVg_142 | AGGUAGGAGCGGGAGCAUUCGUUUAAGAGCUAUGCUGGAAACAGCAUAGC | 532 |
| | AAGUUUAAAUAAGGCUAGUCCGUUAUCAACUUGAAAAAGUGGCACCGAGU | |
| | CGGUGC | |
| HBVg_143 | UCUUUUGGGGUGGAGCCCUCGUUUAAGAGCUAUGCUGGAAACAGCAUAGC | 533 |
| | AAGUUUAAAUAAGGCUAGUCCGUUAUCAACUUGAAAAAGUGGCACCGAGU | |
| | CGGUGC | |
| HBVg_144 | UCAGUAUGCCCUGAGCCUGAGUUUAAGAGCUAUGCUGGAAACAGCAUAGC | 534 |
| | AAGUUUAAAUAAGGCUAGUCCGUUAUCAACUUGAAAAAGUGGCACCGAGU | |
| | CGGUGC | |
| HBVg_145 | UUUAAUGAGUGGGAGGAGUUGUUUAAGAGCUAUGCUGGAAACAGCAUAG | 535 |
| | CAAGUUUAAAUAAGGCUAGUCCGUUAUCAACUUGAAAAAGUGGCACCGAG | |
| | UCGGUGC | |
| HBVg_146 | CUCCCUCGCCUCGCAGACGAGUUUAAGAGCUAUGCUGGAAACAGCAUAGC | 536 |
| | AAGUUUAAAUAAGGCUAGUCCGUUAUCAACUUGAAAAAGUGGCACCGAGU | |
| | CGGUGC | |
| HBVg_147 | GAUAAGAUAGGGGCAUUUGGGUUUAAGAGCUAUGCUGGAAACAGCAUAGC | 537 |
| | AAGUUUAAAUAAGGCUAGUCCGUUAUCAACUUGAAAAAGUGGCACCGAGU | |
| | CGGUGC | |
| HBVg_148 | CCGCGGGAUUCAGCGCCGACGUUUAAGAGCUAUGCUGGAAACAGCAUAGC | 538 |
| | AAGUUUAAAUAAGGCUAGUCCGUUAUCAACUUGAAAAAGUGGCACCGAGU | |
| | CGGUGC | |
| HBVg_149 | CAGCGAUAACCAGGACAAAUGUUUAAGAGCUAUGCUGGAAACAGCAUAGC | 539 |
| | AAGUUUAAAUAAGGCUAGUCCGUUAUCAACUUGAAAAAGUGGCACCGAGU | |
| | CGGUGC | |
| HBVg_150 | CAGGUAGGAGUGGGAGCAUUGUUUAAGAGCUAUGCUGGAAACAGCAUAGC | 540 |
| | AAGUUUAAAUAAGGCUAGUCCGUUAUCAACUUGAAAAAGUGGCACCGAGU | |
| | CGGUGC | |
| HBVg_151 | GUUUAAUGAGUGGGAGGAGUGUUUAAGAGCUAUGCUGGAAACAGCAUAG | 541 |
| | CAAGUUUAAAUAAGGCUAGUCCGUUAUCAACUUGAAAAAGUGGCACCGAG | |
| | UCGGUGC | |
| HBVg_152 | UGGUGAGUGAUUGGAGGUUGGUUUAAGAGCUAUGCUGGAAACAGCAUAG | 542 |
| | CAAGUUUAAAUAAGGCUAGUCCGUUAUCAACUUGAAAAAGUGGCACCGAG | |
| | UCGGUGC | |
| HBVg_153 | UAAUGAGUGGGAGGAGUUGGGUUUAAGAGCUAUGCUGGAAACAGCAUAG | 543 |
| | CAAGUUUAAAUAAGGCUAGUCCGUUAUCAACUUGAAAAAGUGGCACCGAG | |
| | UCGGUGC | |
| HBVg_154 | ACUACAUGUUCUGGAUAAUAGUUUAAGAGCUAUGCUGGAAACAGCAUAGC | 544 |
| | AAGUUUAAAUAAGGCUAGUCCGUUAUCAACUUGAAAAAGUGGCACCGAGU | |
| | CGGUGC | |
| HBVg_155 | GGCAUAGCAGCAGGAUGAAGGUUUAAGAGCUAUGCUGGAAACAGCAUAGC | 545 |
| | AAGUUUAAAUAAGGCUAGUCCGUUAUCAACUUGAAAAAGUGGCACCGAGU | |
| | CGGUGC | |
| HBVg_156 | GUUGAUAAGAUAGGGGCAUUGUUUAAGAGCUAUGCUGGAAACAGCAUAGC | 546 |
| | AAGUUUAAAUAAGGCUAGUCCGUUAUCAACUUGAAAAAGUGGCACCGAGU | |
| | CGGUGC | |
| HBVg_157 | UCAACGAAUUGUGGGUCUUUGUUUAAGAGCUAUGCUGGAAACAGCAUAGC | 547 |
| | AAGUUUAAAUAAGGCUAGUCCGUUAUCAACUUGAAAAAGUGGCACCGAGU | |
| | CGGUGC | |
| HBVg_158 | UAUGGAUGAUGUGGUAUUGGGUUUAAGAGCUAUGCUGGAAACAGCAUAG | 548 |
| | CAAGUUUAAAUAAGGCUAGUCCGUUAUCAACUUGAAAAAGUGGCACCGAG | |
| | UCGGUGC | |
| HBVg_159 | CAACGAAUUGUGGGUCUUUUGUUUAAGAGCUAUGCUGGAAACAGCAUAGC | 549 |
| | AAGUUUAAAUAAGGCUAGUCCGUUAUCAACUUGAAAAAGUGGCACCGAGU | |
| | CGGUGC | |
| HBVg_160 | CAUUUGUUCAGUGGUUCGUAGUUUAAGAGCUAUGCUGGAAACAGCAUAGC | 550 |
| | AAGUUUAAAUAAGGCUAGUCCGUUAUCAACUUGAAAAAGUGGCACCGAGU | |
| | CGGUGC | |
| HBVg_161 | CGUCUAACAACAGUAGUUUCGUUUAAGAGCUAUGCUGGAAACAGCAUAGC | 551 |
| | AAGUUUAAAUAAGGCUAGUCCGUUAUCAACUUGAAAAAGUGGCACCGAGU | |
| | CGGUGC | |
| HBVg_162 | UGCCUGAGUGCUGUAUGGUGGUUUAAGAGCUAUGCUGGAAACAGCAUAGC | 552 |
| | AAGUUUAAAUAAGGCUAGUCCGUUAUCAACUUGAAAAAGUGGCACCGAGU | |
| | CGGUGC | |
| HBVg_163 | GCCCCGAGACGGGUCGUCCGGUUUAAGAGCUAUGCUGGAAACAGCAUAGC | 553 |
| | AAGUUUAAAUAAGGCUAGUCCGUUAUCAACUUGAAAAAGUGGCACCGAGU | |
| | CGGUGC | |
| HBVg_164 | GACUGCCGAUUGGUGGAGGCGUUUAAGAGCUAUGCUGGAAACAGCAUAGC | 554 |
| | AAGUUUAAAUAAGGCUAGUCCGUUAUCAACUUGAAAAAGUGGCACCGAGU | |
| | CGGUGC | |
| HBVg_165 | UAUAUGGAUGAUGUGGUAUUGUUUAAGAGCUAUGCUGGAAACAGCAUAG | 555 |
| | CAAGUUUAAAUAAGGCUAGUCCGUUAUCAACUUGAAAAAGUGGCACCGAG | |
| | UCGGUGC | |
| HBVg_166 | CUUGAGUAUUUGGUGUCUUUGUUUAAGAGCUAUGCUGGAAACAGCAUAGC | 556 |
| | AAGUUUAAAUAAGGCUAGUCCGUUAUCAACUUGAAAAAGUGGCACCGAGU | |
| | CGGUGC | |
| HBVg_167 | GAUCUGGUGGGCGUUCACGGGUUUAAGAGCUAUGCUGGAAACAGCAUAGC | 557 |
| | AAGUUUAAAUAAGGCUAGUCCGUUAUCAACUUGAAAAAGUGGCACCGAGU | |
| | CGGUGC | |
| HBVg_168 | AGACUGGGAGGAGUUGGGGGGUUUAAGAGCUAUGCUGGAAACAGCAUAGC | 558 |
| | AAGUUUAAAUAAGGCUAGUCCGUUAUCAACUUGAAAAAGUGGCACCGAGU | |
| | CGGUGC | |
| HBVg_169 | AGUCCUCUUAUGUAAGACCUGUUUAAGAGCUAUGCUGGAAACAGCAUAGC | 559 |
| | AAGUUUAAAUAAGGCUAGUCCGUUAUCAACUUGAAAAAGUGGCACCGAGU | |
| | CGGUGC | |
| HBVg_170 | CUCAAGAUGUUGUACAGACUGUUUAAGAGCUAUGCUGGAAACAGCAUAGC | 560 |
| | AAGUUUAAAUAAGGCUAGUCCGUUAUCAACUUGAAAAAGUGGCACCGAGU | |
| | CGGUGC | |
| HBVg_171 | GGGAACAAGAGCUACAGCAUGUUUAAGAGCUAUGCUGGAAACAGCAUAGC | 561 |
| | AAGUUUAAAUAAGGCUAGUCCGUUAUCAACUUGAAAAAGUGGCACCGAGU | |
| | CGGUGC | |
| HBVg_172 | UCGCAGAAGAUCUCAAUCUCGUUUAAGAGCUAUGCUGGAAACAGCAUAGC | 562 |
| | AAGUUUAAAUAAGGCUAGUCCGUUAUCAACUUGAAAAAGUGGCACCGAGU | |
| | CGGUGC | |
| HBVg_173 | GGGGUGGAGCCCUCAGGCUCGUUUAAGAGCUAUGCUGGAAACAGCAUAGC | 563 |
| | AAGUUUAAAUAAGGCUAGUCCGUUAUCAACUUGAAAAAGUGGCACCGAGU | |
| | CGGUGC | |
| HBVg_174 | UAUUCCUUGGACUCAUAAGGGUUUAAGAGCUAUGCUGGAAACAGCAUAGC | 564 |
| | AAGUUUAAAUAAGGCUAGUCCGUUAUCAACUUGAAAAAGUGGCACCGAGU | |
| | CGGUGC | |
| HBVg_175 | UCUAAGAGACAGUCAUCCUCGUUUAAGAGCUAUGCUGGAAACAGCAUAGC | 565 |
| | AAGUUUAAAUAAGGCUAGUCCGUUAUCAACUUGAAAAAGUGGCACCGAGU | |
| | CGGUGC | |
| HBVg_176 | CAACUCAAACAAUCCAGAUUGUUUAAGAGCUAUGCUGGAAACAGCAUAGC | 566 |
| | AAGUUUAAAUAAGGCUAGUCCGUUAUCAACUUGAAAAAGUGGCACCGAGU | |
| | CGGUGC | |
| HBVg_177 | AAACAAAGGACGUCCCGCGCGUUUAAGAGCUAUGCUGGAAACAGCAUAGC | 567 |
| | AAGUUUAAAUAAGGCUAGUCCGUUAUCAACUUGAAAAAGUGGCACCGAGU | |
| | CGGUGC | |
| HBVg_178 | CUGCCAACUGGAUCCUGCGCGUUUAAGAGCUAUGCUGGAAACAGCAUAGC | 568 |
| | AAGUUUAAAUAAGGCUAGUCCGUUAUCAACUUGAAAAAGUGGCACCGAGU | |
| | CGGUGC | |
| HBVg_179 | GAAGCUCCAAAUUCUUUAUAGUUUAAGAGCUAUGCUGGAAACAGCAUAGC | 569 |
| | AAGUUUAAAUAAGGCUAGUCCGUUAUCAACUUGAAAAAGUGGCACCGAGU | |
| | CGGUGC | |
| HBVg_180 | GUCAGUAUGCCCUGAGCCUGGUUUAAGAGCUAUGCUGGAAACAGCAUAGC | 570 |
| | AAGUUUAAAUAAGGCUAGUCCGUUAUCAACUUGAAAAAGUGGCACCGAGU | |
| | CGGUGC | |
| HBVg_181 | UUUCCCACCUUAUGAGUCCAGUUUAAGAGCUAUGCUGGAAACAGCAUAGC | 571 |
| | AAGUUUAAAUAAGGCUAGUCCGUUAUCAACUUGAAAAAGUGGCACCGAGU | |
| | CGGUGC | |
| HBVg_182 | ACAAGAGGUUGGUGAGUGAUGUUUAAGAGCUAUGCUGGAAACAGCAUAGC | 572 |
| | AAGUUUAAAUAAGGCUAGUCCGUUAUCAACUUGAAAAAGUGGCACCGAGU | |
| | CGGUGC | |
| HBVg_183 | GAAAGCCCAAGAUGAUGGGAGUUUAAGAGCUAUGCUGGAAACAGCAUAGC | 573 |
| | AAGUUUAAAUAAGGCUAGUCCGUUAUCAACUUGAAAAAGUGGCACCGAGU | |
| | CGGUGC | |
| HBVg_184 | AGGUUCCACGCAUGCGCUGAGUUUAAGAGCUAUGCUGGAAACAGCAUAGC | 574 |
| | AAGUUUAAAUAAGGCUAGUCCGUUAUCAACUUGAAAAAGUGGCACCGAGU | |
| | CGGUGC | |
| HBVg_185 | UUGGUGAGUGAUUGGAGGUUGUUUAAGAGCUAUGCUGGAAACAGCAUAG | 575 |
| | CAAGUUUAAAUAAGGCUAGUCCGUUAUCAACUUGAAAAAGUGGCACCGAG | |
| | UCGGUGC | |
| HBVg_186 | AGAGCUACAGCAUGGGAGGUGUUUAAGAGCUAUGCUGGAAACAGCAUAGC | 576 |
| | AAGUUUAAAUAAGGCUAGUCCGUUAUCAACUUGAAAAAGUGGCACCGAGU | |
| | CGGUGC | |
| HBVg_187 | AUAUGGAUGAUGUGGUAUUGGUUUAAGAGCUAUGCUGGAAACAGCAUAG | 577 |
| | CAAGUUUAAAUAAGGCUAGUCCGUUAUCAACUUGAAAAAGUGGCACCGAG | |
| | UCGGUGC | |
| HBVg_188 | CCAUUUGUUCAGUGGUUCGUGUUUAAGAGCUAUGCUGGAAACAGCAUAGC | 578 |
| | AAGUUUAAAUAAGGCUAGUCCGUUAUCAACUUGAAAAAGUGGCACCGAGU | |
| | CGGUGC | |
| HBVg_189 | UUAUAUGGAUGAUGUGGUAUGUUUAAGAGCUAUGCUGGAAACAGCAUAG | 579 |
| | CAAGUUUAAAUAAGGCUAGUCCGUUAUCAACUUGAAAAAGUGGCACCGAG | |
| | UCGGUGC | |
| HBVg_190 | GGAGUGGGAGCAUUCGGGCCGUUUAAGAGCUAUGCUGGAAACAGCAUAGC | 580 |
| | AAGUUUAAAUAAGGCUAGUCCGUUAUCAACUUGAAAAAGUGGCACCGAGU | |
| | CGGUGC | |
| HBVg_191 | AUUUGGUGUCUUUUGGAGUGGUUUAAGAGCUAUGCUGGAAACAGCAUAGC | 581 |
| | AAGUUUAAAUAAGGCUAGUCCGUUAUCAACUUGAAAAAGUGGCACCGAGU | |
| | CGGUGC | |
| HBVg_192 | CACAGAAAGGCCUUGUAAGUGUUUAAGAGCUAUGCUGGAAACAGCAUAGC | 582 |
| | AAGUUUAAAUAAGGCUAGUCCGUUAUCAACUUGAAAAAGUGGCACCGAGU | |
| | CGGUGC | |
| HBVg_193 | ACCAAUUUUCUUUUGUCUUUGUUUAAGAGCUAUGCUGGAAACAGCAUAGC | 583 |
| | AAGUUUAAAUAAGGCUAGUCCGUUAUCAACUUGAAAAAGUGGCACCGAGU | |
| | CGGUGC | |
| HBVg_194 | AGGUUAAUGGUCUUUGUACUGUUUAAGAGCUAUGCUGGAAACAGCAUAGC | 584 |
| | AAGUUUAAAUAAGGCUAGUCCGUUAUCAACUUGAAAAAGUGGCACCGAGU | |
| | CGGUGC | |
| HBVg_195 | UACCAAUUUUCUUUUGUCUUGUUUAAGAGCUAUGCUGGAAACAGCAUAGC | 585 |
| | AAGUUUAAAUAAGGCUAGUCCGUUAUCAACUUGAAAAAGUGGCACCGAGU | |
| | CGGUGC | |

[0284] In some embodiments, a gRNA provided herein targets a target site in the Hepatitis B viral genome. In some embodiments, the gRNA targets a site positioned between 0-3300 bp of the HBV genome. In some embodiments, the gRNA targets a site positioned between 43 bp-490 bp, 1033 bp-1749 bp, 1800 bp-1950 bp, or 2953 bp-3182 of the HBV genome corresponding to positions with reference to the Hepatitis B Virus genome (Hepatitis B virus subtype ayw, complete genome, GenBank: U95551.1), SEQ ID NO: 650. In some embodiments, the gRNA targets a site positioned between 1 bp-42 bp, 491 bp-1032 bp, 1750 bp-1799 bp, or 1951 bp-2952 bp of the HBV genome corresponding to positions with reference to the Hepatitis B Virus genome (Hepatitis B virus subtype ayw, complete genome, GenBank: U95551.1), SEQ ID NO: 650. In some embodiments, the gRNA targets a site at or near a regulatory element involved in HBV replication and/or transcription. In some embodiments, the gRNA targets polymerase gene, S-family gene, X-gene, or core family gene. In some embodiments, the gRNA targets the M/S-HBs, X, basal core, L-HBs promoter regions. In some embodiments, the gRNA targets Enh1 or an Enh2 enhancer region. In some embodiments, the gRNA targets an HBV coding region.

[0285] In some embodiments, a gRNA provided herein comprises the sequence selected from any one of SEQ ID NO: 196-229, a contiguous portion thereof of at least 14 nucleotides (e.g. 14, 15, 16, 17, 18 or 19 nucleotides), a complementary sequence of any of the foregoing, or a sequence having at or at least 80%, 85%, 90%, 91%, 92%, 93%, 94%, 95%, 96%, 97%, 98%, 99%, 99.5%, 99.9%, or 100% sequence identity to any of the foregoing. In some embodiments, the gRNA comprises a spacer sequence comprising the sequence selected from any one of SEQ ID NO:230-295, a contiguous portion thereof of at least 14 nt (e.g. 14, 15, 16, 17, 18 or 19 nucleotides), or a sequence having at or at least 80%, 85%, 90%, 91%, 92%, 93%, 94%, 95%, 96%, 97%, 98%, 99%, 99.5%, 99.9%, or 100% sequence identity to any of the foregoing. In some embodiments, the gRNA comprises a spacer sequence comprising the sequence selected from any one of SEQ ID NO:296-390, a contiguous portion thereof of at least 14 nt (e.g. 14, 15, 16, 17, 18 or 19 nucleotides), or a sequence having at or at least 80%, 85%, 90%, 91%, 92%, 93%, 94%, 95%, 96%, 97%, 98%, 99%, 99.5%, 99.9%, or 100% sequence identity to any of the foregoing. In some embodiments, the gRNA further comprises a scaffold sequence. In some embodiments, the scaffold sequence comprises the sequence set forth in SEQ ID NO:587, or a sequence having at or at least 80%, 85%, 90%, 91%, 92%, 93%, 94%, 95%, 96%, 97%, 98%, 99%, 99.5%, 99.9%, or 100% sequence identity to SEQ ID NO:587. In some embodiments, the gRNA, including a spacer sequence and a scaffold sequence, comprises the sequence selected from any one of SEQ ID NO:391-585, or a sequence having at or at least 80%, 85%, 90%, 91%, 92%, 93%, 94%, 95%, 96%, 97%, 98%, 99%, 99.5%, 99.9%, or 100% sequence identity to all or a portion thereof.

[0286] In some embodiments, the gRNA comprises a spacer sequence comprising the sequence selected from any one of SEQ ID NOS: 370, 333, 387, 347, 313, 320, 380, 256, 258, 311, 319, 230, 272, a contiguous portion thereof of at least 14 nucleotides (e.g. 14, 15, 16, 17, 18 or 19 nucleotides), a complementary sequence of any of the foregoing, or a sequence having at or at least 80%, 85%, 90%, 91%, 92%, 93%, 94%, 95%, 96%, 97%, 98%, 99%, 99.5%, 99.9%, or 100% sequence identity to any of the foregoing. In some embodiments, the gRNA further comprises a scaffold sequence. In some embodiments, the scaffold sequence comprises the sequence set forth in SEQ ID NO:587, or a sequence having at or at least 80%, 85%, 90%, 91%, 92%, 93%, 94%, 95%, 96%, 97%, 98%, 99%, 99.5%, 99.9%, or 100% sequence identity to SEQ ID NO:587. In some embodiments, the gRNA, including a spacer sequence and a scaffold sequence, comprises the sequence selected from any one of SEQ ID NOS: 565, 528, 542, 508, 515, 575, 515, 453, 506, 514, 425, or 472, or a sequence having at or at least 80%, 85%, 90%, 91%, 92%, 93%, 94%, 95%, 96%, 97%, 98%, 99%, 99.5%, 99.9%, or 100% sequence identity to all or a portion thereof. In some embodiments, the gRNA is set forth in SEQ ID NOS: 565, 528, 542, 508, 515, 575, 515, 453, 506, 514, 425, or 472.

[0287] In some embodiments, the gRNA comprises a spacer sequence comprising the sequence selected from any one of SEQ ID NOS: 200, 205, 207, 213, 217, 221, 224, 233, 251, 256, 257, 258, 263, 267, 274, 275, 277, 279, 293, 294, 311. 313, 316, 319, 320, 330, 333, 338, 345, 347, 353, 359, 370, 371, 377, 380, 384, 385, 387, a contiguous portion thereof of at least 14 nucleotides (e.g. 14, 15, 16, 17, 18 or 19 nucleotides), a complementary sequence of any of the foregoing, or a sequence having at or at least 80%, 85%, 90%, 91%, 92%, 93%, 94%, 95%, 96%, 97%, 98%, 99%, 99.5%, 99.9%, or 100% sequence identity to any of the foregoing. In some embodiments, the gRNA further comprises a scaffold sequence. In some embodiments, the scaffold sequence comprises the sequence set forth in SEQ ID NO:587, or a sequence having at or at least 80%, 85%, 90%, 91%, 92%, 93%, 94%, 95%, 96%, 97%, 98%, 99%, 99.5%, 99.9%, or 100% sequence identity to SEQ ID NO:587. In some embodiments, the gRNA, including a spacer sequence and a scaffold sequence, comprises the sequence selected from any one of SEQ ID NOS: 395, 400, 402, 408, 412, 416, 419, 428, 446, 451, 452, 453, 458, 462, 465, 469, 470, 472, 474, 488, 489, 506, 508, 511, 514, 515, 525, 528, 533, 540, 542, 548, 554, 565, 566, 572, 575, 579, 580, 582, or a sequence having at or at least 80%, 85%, 90%, 91%, 92%, 93%, 94%, 95%, 96%, 97%, 98%, 99%, 99.5%, 99.9%, or 100% sequence identity to all or a portion thereof. In some embodiments, the gRNA comprises a spacer sequence comprising the sequence selected from any one of SEQ ID NOS: 200, 201, 207, 217, 221, 224, 233, 237, 238, 246, 251, 256, 258, 263, 267, 274, 270, 277, 279, 283, 284, 293, 294, 308, 311, 313, 316, 319, 320, 325, 328, 330, 333, 338, 345, 347, 350, 353, 359, 360, 370, 371, 377, 380, 384, 385, 387, a contiguous portion thereof of at least 14 nucleotides (e.g. 14, 15, 16, 17, 18 or 19 nucleotides), a complementary sequence of any of the foregoing, or a sequence having at or at least 80%, 85%, 90%, 91%, 92%, 93%, 94%, 95%, 96%, 97%, 98%, 99%, 99.5%, 99.9%, or 100% sequence identity to any of the foregoing. In some embodiments, the gRNA further comprises a scaffold sequence. In some embodiments, the scaffold sequence comprises the sequence set forth in SEQ ID NO:587, or a sequence having at or at least 80%, 85%, 90%, 91%, 92%, 93%, 94%, 95%, 96%, 97%, 98%, 99%, 99.5%, 99.9%, or 100% sequence identity to SEQ ID NO:587. In some embodiments, the gRNA, including a spacer sequence and a scaffold sequence, comprises the sequence selected from any one of SEQ ID NOS: 369, 395, 402, 408, 412, 416, 419, 428, 432, 433, 441, 446, 451, 453, 458, 462, 465, 469, 472, 474, 478, 479, 488, 489, 503, 506, 508, 511, 514, 515, 520, 523, 525, 575, 528, 533, 540, 542, 545, 548, 554, 555, 565, 566, 572, 579, 580, 582, or a sequence having at or at least 80%, 85%, 90%, 91%, 92%, 93%, 94%, 95%, 96%, 97%, 98%, 99%, 99.5%, 99.9%, or 100% sequence identity to all or a portion thereof. In some embodiments, the gRNA is set forth in SEQ ID NOS: 369, 395, 402, 408, 412, 416, 419, 428, 432, 433, 441, 446, 451, 453, 458, 462, 465, 469, 472, 474, 478, 479, 488, 489, 503, 506, 508, 511, 514, 515, 520, 523, 525, 575, 528, 533, 540, 542, 545, 548, 554, 555, 565, 566, 572, 579, 580 or 582.

[0288] In some embodiments, the gRNA comprises a spacer sequence comprising the sequence selected from any one of SEQ ID NOS: 207, 213, 215, 217, 221, 222, 241, 245, 258, 261, 268, 274, 380, 387, a contiguous portion thereof of at least 14 nucleotides (e.g. 14, 15, 16, 17, 18 or 19 nucleotides), a complementary sequence of any of the foregoing, or a sequence having at or at least 80%, 85%, 90%, 91%, 92%, 93%, 94%, 95%, 96%, 97%, 98%, 99%, 99.5%, 99.9%, or 100% sequence identity to any of the foregoing. In some embodiments, the gRNA comprises a spacer sequence comprising the sequence SEQ ID NOS: 217, a contiguous portion thereof of at least 14 nucleotides (e.g. 14, 15, 16, 17, 18 or 19 nucleotides), a complementary sequence of any of the foregoing, or a sequence having at or at least 80%, 85%, 90%, 91%, 92%, 93%, 94%, 95%, 96%, 97%, 98%, 99%, 99.5%, 99.9%, or 100% sequence identity to SEQ ID NOS: 217. In some embodiments, the gRNA further comprises a scaffold sequence. In some embodiments, the scaffold sequence comprises the sequence set forth in SEQ ID NO:587, or a sequence having at or at least 80%, 85%, 90%, 91%, 92%, 93%, 94%, 95%, 96%, 97%, 98%, 99%, 99.5%, 99.9%, or 100% sequence identity to SEQ ID NO:587. In some embodiments, the gRNA, including a spacer sequence and a scaffold sequence, comprises the sequence selected from any one of SEQ ID NOS: 402, 408, 410, 412, 416, 417, 436, 440, 453, 456, 463, 469, 575, 582, or a sequence having at or at least 80%, 85%, 90%, 91%, 92%, 93%, 94%, 95%, 96%, 97%, 98%, 99%, 99.5%, 99.9%, or 100% sequence identity to all or a portion thereof. In some embodiments, a provided multiplexed epigenetic-modifying DNA-targeting system for epigenetic modification of at least two genes and/or regulatory elements thereof includes any of the aforementioned gRNAs complexed with a Cas protein, such as a Cas9 protein. In some embodiments, the Cas9 is a dCas9. In some embodiments, the dCas9 is a dSpCas9, such as a dSpCas9 set forth in SEQ ID NO: 599, or a variant and/or fusion thereof.

[0289] In some embodiments, provided herein is a combination of gRNAs. In some embodiments, provided herein is a multiplexed epigenetic-modifying DNA-targeting system comprising the combination of gRNAs.

[0290] In some embodiments, the combination of gRNAs comprises at least two gRNAs targeting at least two different genes or regulatory elements thereof. In some embodiments, the combination of gRNAs comprises a first gRNA targeted to a first gene or regulatory element thereof and a second gRNA targeted to a second gene or regulatory elements thereof. In some embodiments, the first gRNA targets a gene or regulatory elements thereof selected from the list consisting of polymerase gene, S-family gene, X-gene, core family gene, pre-S1 promoter, pre-S2 promoter, X promoter, basal core promoter, Enh1 enhancer, Enh2 enhancer, a transcript processing control region, and any coding region within the HBV genome, the second gRNA targets a gene or regulatory element thereof selected from the list consisting of polymerase gene, S-family gene, X-gene, core family gene, pre-S1 promoter, pre-S2 promoter, X promoter, basal core promoter, Enh1 enhancer, Enh2 enhancer, a transcript processing control region, and any coding region within the HBV genome, and the first and second gRNAs target different genes or regulatory elements thereof. In some embodiments, the first gRNA targets Enh1 enhancer, and the second gRNA targets a gene selected from the list consisting of L-HBs promoter, M-HBs promoter, S-HBs promoter, X-promoter, Basal core promoter, S-gene promoter, and Enh2 enhancer. In some embodiments, the first gRNA targets Enh1 enhancer, and the second gRNA targets L-HBs. In some embodiments, the first gRNA and second gRNA target a combination of two genes selected from the combinations of genes listed in Table 1. In some embodiments, the first gRNA and second gRNA are each independently selected from any of the gRNAs described herein.

[0291] In some embodiments, the combination of gRNAs comprises at least three gRNAs targeting at least three different genes or regulatory elements thereof. In some embodiments, the combination of gRNAs comprises a first gRNA targeted to a first gene, a second gRNA targeted to a second gene, and a third gRNA targeted to a third gene. In some embodiments, the combination of gRNAs comprises at least three gRNAs targeting at least three different genes or regulatory elements thereof. In some embodiments, the combination of gRNAs comprises a first gRNA targeted to a first gene or regulatory element thereof, a second gRNA targeted to a second gene or regulatory elements thereof, and a third gRNA targeted to a third gene or regulatory element thereof. In some embodiments, the first gRNA targets a gene or regulatory elements thereof selected from the list consisting of polymerase gene, S-family gene, X-gene, core family gene, pre-S1 promoter, pre-S2 promoter, X promoter, basal core promoter, Enh1 enhancer, Enh2 enhancer, a transcript processing control region, and any coding region within the HBV genome, the second gRNA targets a gene or regulatory element thereof selected from the list consisting of polymerase gene, S-family gene, X-gene, core family gene, pre-S1 promoter, pre-S2 promoter, X promoter, basal core promoter, Enh1 enhancer, Enh2 enhancer, a transcript processing control region, and any coding region within the HBV genome, the third gRNA targets a gene or regulatory elements thereof selected from the list consisting of polymerase gene, S-family gene, X-gene, core family gene, pre-S1 promoter, pre-S2 promoter, X promoter, basal core promoter, Enh1 enhancer, Enh2 enhancer, a transcript processing control region, and any coding region within the HBV genome, and the first, second, and third gRNAs target different genes or regulatory elements thereof. In some embodiments, the first gRNA targets Enh1 enhancer, the second gRNA targets a gene selected from the list consisting L-HBs promoter, M-HBs promoter, S-HBs promoter, X-promoter, Basal core promoter, S-gene promoter, Enh1 enhancer, and Enh2 enhancer, the third gRNA targets a gene selected from the list consisting of L-HBs promoter, M-HBs promoter, S-HBs promoter, X-promoter, Basal core promoter, S-gene promoter, Enh1 enhancer, and Enh2 enhancer and the second gRNA and third gRNA target different genes. In some embodiments, the first gRNA targets Enh1 enhancer, the second gRNA targets L-HBs promoter, and the third gRNA targets a gene selected from the list consisting of M-HBs promoter, S-HBs promoter, X-promoter, Basal core promoter, S-gene promoter, and Enh2 enhancer. In some embodiments, the first gRNA, second gRNA, and third gRNA target a combination of three genes selected from the combinations of genes listed in Table 2. In some embodiments, the first gRNA, second gRNA, and third gRNA are each independently selected from any of the gRNAs described herein.

[0292] In some embodiments, the combination of gRNAs comprises at least four gRNAs targeting at least four different genes or regulatory element thereof. In some embodiments, the combination of gRNAs comprises a first gRNA targeted to a first gene, a second gRNA targeted to a second gene, a third gRNA targeted to a third gene, and a fourth gRNA targeted to a fourth gene. In some embodiments, the combination of gRNAs comprises at least four gRNAs targeting at least four different genes or regulatory elements thereof. In some embodiments, the combination of gRNAs comprises a first gRNA targeted to a first gene or regulatory element thereof, a second gRNA targeted to a second gene or regulatory elements thereof, a third gRNA targeted to a third gene or regulatory element thereof, and a fourth gRNA targeted to a third gene or regulatory element thereof. In some embodiments, the first gRNA targets a gene or regulatory elements thereof selected from the list consisting of polymerase gene, S-family gene, X-gene, core family gene, pre-S1 promoter, pre-S2 promoter, X promoter, basal core promoter, Enh1 enhancer, Enh2 enhancer, a transcript processing control region, and any coding region within the HBV genome, the second gRNA targets a gene or regulatory element thereof selected from the list consisting of polymerase gene, S-family gene, X-gene, core family gene, pre-S1 promoter, pre-S2 promoter, X promoter, basal core promoter, Enh1 enhancer, Enh2 enhancer, a transcript processing control region, and any coding region within the HBV genome, the third gRNA targets a gene or regulatory elements thereof selected from the list consisting of polymerase gene, S-family gene, X-gene, core family gene, pre-S1 promoter, pre-S2 promoter, X promoter, basal core promoter, Enh1 enhancer, Enh2 enhancer, a transcript processing control region, and any coding region within the HBV genome, the fourth gRNA targets a gene or regulatory elements thereof selected from the list consisting of polymerase gene, S-family gene, X-gene, core family gene, pre-S1 promoter, pre-S2 promoter, X promoter, basal core promoter, Enh1 enhancer, Enh2 enhancer, a transcript processing control region, and any coding region within the HBV genome, and the first, second, third, and fourth gRNAs target different genes or regulatory elements thereof. In some embodiments, the first gRNA targets Enh1 enhancer, the second gRNA targets a gene selected from the list consisting L-HBs promoter, M-HBs promoter, S-HBs promoter, X-promoter, Basal core promoter, S-gene promoter, Enh1 enhancer, and Enh2 enhancer, the third gRNA targets a gene selected from the list consisting of L-HBs promoter, M-HBs promoter, S-HBs promoter, X-promoter, Basal core promoter, S-gene promoter, Enh1 enhancer, and Enh2 enhancer, the fourth gRNA targets a gene selected from the list consisting of L-HBs promoter, M-HBs promoter, S-HBs promoter, X-promoter, Basal core promoter, S-gene promoter, Enh1 enhancer, and Enh2 enhancer and the first, second, third, and fourth gRNAs target different genes or regulatory elements thereof. In some embodiments, the first gRNA, second gRNA, third gRNA, and fourth target a combination of four genes or regulatory elements thereof selected from the combinations of genes or regulatory elements thereof listed in Table 2. In some embodiments, the first gRNA, second gRNA, third gRNA, and fourth gRNA are each independently selected from any of the gRNAs described herein.

[0293] In some embodiments, the combination of gRNAs comprises at least five gRNAs targeting at least five different genes or regulatory element thereof. In some embodiments, the combination of gRNAs comprises at least six gRNAs targeting at least six different genes and/or regulatory element thereof. In some embodiments, the first, second, third, fourth, fifth, and/or sixth genes or regulatory elements thereof are different.

[0294] C. Engineered Zinc Finger Proteins (eZFPs)

[0295] In some aspects, provided herein are zinc finger proteins (ZFPs), such as engineered zinc finger proteins (eZFPs). In some embodiments, the eZFPs are capable of binding to, or bind to, a target site in an HBV gene or a regulatory element of a gene in the Hepatitis B Virus sequence. In some aspects, the eZFP can facilitate specific targeting of effector domains for transcriptional repression of a gene or a regulatory element. In some embodiments, provided herein are epigenetic-modifying DNA-targeting systems comprising fusion proteins comprising the eZFP and one or more other elements, such as the effector domains for transcriptional repression. Thus, in some aspects the eZFP facilitates decreased expression of an HBV gene or regulatory element, for example in connection with compositions and methods for treating a disease or disorder associated with HBV such as an HBV viral infection, liver disease, or cancer.

[0296] In some embodiments, a zinc finger protein (ZFP), a zinc finger DNA binding protein, or zinc finger DNA binding domain, is a protein, or a domain within a larger protein, that binds DNA in a sequence-specific manner through one or more zinc fingers, which are regions of amino acid sequence within the binding domain, having a structure that is stabilized through coordination of a zinc ion. Among the ZFPs are artificial, or engineered, ZFPs (eZFPs), comprising ZFP domains targeting specific DNA sequences, typically 9-18 nucleotides long, generated by assembly of individual zinc fingers. ZFPs include those in which a single finger domain is approximately 30 amino acids in length and contains an alpha helix containing two invariant histidine residues coordinated through zinc with two cysteines of a single beta turn, and having two, three, four, five, or six fingers. Generally, sequence-specificity of a ZFP may be altered by making amino acid substitutions at the four helix positions (−1, 2, 3, and 6) on a zinc finger recognition helix, also called a zinc finger recognition region. Thus, for example, a ZFP or ZFP-containing molecule, such as a fusion protein, can be non-naturally occurring, e.g., is engineered to bind to a target site of choice.

[0297] In some embodiments, zinc fingers can be custom-designed (i.e. designed by the user), and/or obtained from a commercial source. Various methods for designing zinc finger proteins are available. For example, methods for designing zinc finger proteins to bind to a target DNA sequence of interest are described, for example in Liu, Q. et al., PNAS, 94(11):5525-30 (1997); Wright, D. A. et al., Nat. Protoc., 1(3):1637-52 (2006); Gersbach, C. A. et al., Acc. Chem. Res., 47(8):2309-18 (2014); Bhakta M.S. et al., Methods Mol. Biol., 649:3-30 (2010); and Gaj et al., Trends Biotechnol, 31(7):397-405 (2013). In addition, various web-based tools for designing zinc finger proteins to bind to a DNA target sequence of interest are publicly available. See, for example, the Zinc Finger Tools design web site from Scripps available on the world wide web at scripps.edu/barbas/zfdesign/zfdesignhome.php. Various commercial services for designing zinc finger proteins to bind to a DNA target sequence of interest are also available. See, for example, the commercially available services or kits offered by Creative Biolabs (world wide web at creative-biolabs.com/Design-and-Synthesis-of-Artificial-Zinc-Finger-Proteins.html), the Zinc Finger Consortium Modular Assembly Kit available from Addgene (world wide web at addgene.org/kits/zfc-modular-assembly/), or the CompoZr Custom ZFN Service from Sigma Aldrich (world wide web at sigmaaldrich.com/life-science/zinc-finger-nuclease-technology/custom-zfn.html).

[0298] In some embodiments, provided herein are epigenetic-modifying DNA-targeting systems comprising fusion proteins comprising the eZFP and one or more other elements, such as the effector domains for transcriptional repression. In some embodiments, the at least one DNA-binding domain of the epigenetic modifying DNA-targeting system comprises an engineered zinc finger protein (eZFP). In some embodiments, the epigenetic-modifying DNA-targeting system comprises an engineered zinc finger protein (eZFP) that binds to a target site in one or more HBV genes or regulatory elements thereof. The target site targeted by any of the provided eZFP can be any as described herein, such as any target site described in Section I.A.

[0299] In some embodiments, the target site for an eZFP (e.g., such as an eZFP comprised in a fusion protein of an epigenetic-modifying DNA-targeting system) provided herein is in one or more HBV genes or regulatory elements thereof. In some embodiments, the target site is in a CpG island (e.g., CpG island 1, CpG island 2, CpG island 3) of the HBV genome. In some embodiments, the target site is in CpG island 2 of the HBV genome. In some embodiments, the target site is within a target region spanning 1033 bp-1749 bp of the HBV genome corresponding to positions with reference to the HBV genome set forth in SEQ ID NO: 650. In some embodiments, the target site is within a target region spanning within 300 base pairs (bp), within 250 bp, within 200 bp, within 150 bp, within 140 bp, within 130 bp, within 120 bp, within 110 bp or within 100 bp upstreat of the HBx start codon. In some embodiments, the target site is within a target region sequence corresponding to the sequence spanning 1250-1374 bp with reference to the HBV genome set forth in SEQ ID NO: 650. In some embodiments, the target region has the sequence set forth in SEQ ID NO: 1068. In some embodiments, the target site is within a target region sequence corresponding to the sequence spanning 1255-1302 bp with reference to the HBV genome set forth in SEQ ID NO: 650. In some embodiments, the target region has the sequence set forth in SEQ ID NO: 1069. In some embodiments, the target site is within a target region sequence corresponding to the sequence spanning 1260-1300 bp with reference to the HBV genome set forth in SEQ ID NO: 650. In some embodiments, the target region has the sequence set forth in SEQ ID NO: 1070.

[0300] In some embodiments, the target site for an eZFP (e.g., such as an eZFP comprised in a fusion protein of an epigenetic-modifying DNA-targeting system) provided herein comprises the nucleotide sequence set forth in any one of SEQ ID NOS:1028-1055 a contiguous portion thereof of at least 12 nt, or a complementary sequence of any of the foregoing. In some embodiments, the target site for an eZFP provided herein comprises the nucleotide sequence set forth in any one of SEQ ID NOS: 1028-1055. In some embodiments, the target site for an eZFP provided herein comprises the nucleotide sequence set forth in any one of SEQ ID NOS: 1045, 1046, or 1052, a contiguous portion thereof of at least 12 nt, or a complementary sequence of any of the foregoing. In some embodiments, the target site comprises the nucleotide sequence set forth in any one of SEQ ID NOS: 1045, 1046, or 1052.

[0301] In some embodiments, the target site is comprised in double-stranded DNA, such as HBV sequence integrated into human genomic DNA. In some embodiments, the target site is comprised in a covalently closed circular (cccDNA) HBV sequence. In some embodiments, the target site is comprised in a relaxed circular DNA (rcNDA) HBV sequence. In some embodiments, the eZFP is capable of binding to the target site. In some embodiments, the eZFP binds to the target site. In some embodiments, the binding is target-specific. For example, in some embodiments, an eZFP binds to the target site, and not to other sites comprising different sequences. For example, in some embodiments, an individual eZFP disclosed herein binds to the target site set forth in any one of SEQ ID NOS: 1028-1055, and does not bind to a different target site. in some embodiments, an individual eZFP disclosed herein binds to the target site set forth in any one of SEQ ID NOS: 1045, 1046, or 1052, and does not bind to a different target site. In some embodiments, the target site for an eZFP provided herein comprises a sequence set forth in Table 7.

TABLE 7
eZFP target sequences

| eZFP Target Site Sequence | SEQ ID NO: |
|---|---|
| CAAGTGTTTGCTGACGCA | 1028 |
| GGCTGGGGCTTGGTCATG | 1029 |
| GCTGGGGCTTGGTCATGG | 1030 |
| TTGGTCATGGGCCATCAG | 1031 |
| TGCGTGGAACCTTTTCGG | 1032 |
| GCAGCAGGTCTGGAGCAA | 1033 |
| CAGCAGGTCTGGAGCAAA | 1034 |
| AGCAGGTCTGGAGCAAAC | 1035 |
| ATCGTATCCATGGCTGCT | 1036 |
| CCAGTGGGGGTTGCGTCA | 1037 |
| CCCCAGCCAGTGGGGGTT | 1038 |
| GCGCTGATGGCCCATGAC | 1039 |
| CACGCACGCGCTGATGGC | 1040 |
| AGAGGAGCCGAAAAGGTT | 1041 |
| GGATCGGCAGAGGAGCCG | 1042 |
| CAGTATGGATCGGCAGAG | 1043 |
| GTTCCGCAGTATGGATCG | 1044 |
| GGAGTTCCGCAGTATGGA | 1045 |
| GCAAAACAAGCGGCTAGG | 1046 |
| TTTGCTCCAGACCTGCTG | 1047 |
| GATGTATATTTGCGGGAG | 1048 |
| CAGCCAGTGGGGGTTGCG | 1049 |
| GATGGCCCATGACCAAGC | 1050 |
| GGGGTAAAGGTTCAGGTA | 1051 |
| GCTAGGAGTTCCGCAGTA | 1052 |
| GCGGCTAGGAGTTCCGCA | 1053 |
| GTATGGATCGGCAGAGGA | 1054 |
| CCGATCCATACTGCGGAA | 1055 |

[0302] In some embodiments, the target site for an eZFP provided herein (e.g., such as an eZFP comprised in a fusion protein of an epigenetic-modifying DNA-targeting system) comprises the nucleotide sequence set forth in SEQ ID NO: 1045. In some embodiments, a contiguous portion thereof of at least 12 nt, or a complementary sequence of any of the foregoing. In some embodiments, the target site for an eZFP provided herein comprises the sequence set forth in SEQ ID NO:1045.

[0303] In some embodiments, the target site for an eZFP provided herein (e.g., such as an eZFP comprised in a fusion protein of an epigenetic-modifying DNA-targeting system) comprises the nucleotide sequence set forth in SEQ ID NO: 1046. In some embodiments, a contiguous portion thereof of at least 12 nt, or a complementary sequence of any of the foregoing. In some embodiments, the target site for an eZFP provided herein comprises the sequence set forth in SEQ ID NO:1046.

[0304] In some embodiments, the target site for an eZFP provided herein (e.g., such as an eZFP comprised in a fusion protein of an epigenetic-modifying DNA-targeting system) comprises the nucleotide sequence set forth in SEQ ID NO: 1052. In some embodiments, a contiguous portion thereof of at least 12 nt, or a complementary sequence of any of the foregoing. In some embodiments, the target site for an eZFP provided herein comprises the sequence set forth in SEQ ID NO:1052.

[0305] In some embodiments, the eZFP comprises multiple zinc fingers. In some embodiments, each zinc finger comprises a recognition region. In some embodiments, the recognition regions together facilitate sequence-specific binding of the eZFP, for example to a specific target site. In some embodiments, the eZFP comprises six zinc fingers denoted F1 through F6 in order from N-terminus to C-terminus, each comprising a corresponding recognition region F1 through F6, which facilitate sequence-specific binding to a specific target site.

[0306] In some embodiments, characteristics of eZFPs targeting specific target sites provided herein are shown in Table E4. In some embodiments, the eZFP comprises six zinc fingers denoted F1 through F6 in order from N-terminus to C-terminus, each comprising a corresponding recognition region F1-F6, as shown in Table E4. In some embodiments, the recognition regions F1-F6 facilitate specific binding to the indicated target site sequence in Table E4. In some embodiments, the eZFP comprises an amino acid sequence comprising the recognition regions, as shown in Table E4. In some embodiments, the eZFP can be encoded by a DNA sequence as shown in Table 8.

TABLE 8
eZFP DNA sequences

| SEQ | | |
|---|---|---|
| ID | | |
| NOs | Sequence | Description |
| 888 | GCTGCTATGGCAGAGCGGCCATTTCAGTGTCGAATTTGCATGCGAAATTTCTCTAGCG | ZFP |
| | AAGCGGATCGAAGTAGACATATCCGGACCCATACGGGTGAGAAACCGTTCGCGTGTG | DNA |
| | ATATATGCGGTCGCAAATTCGCAGACCGCTCCAACCTGACAAGGCACACAAAAATTCA | sequence |
| | TACTGGAAGCCAGAAACCGTTTCAGTGCCGGATTTGTATGCGCAATTTCTCTCAATCCT | |
| | CCGATCTCTCCCGCCACATCAGGACTCATACCGGGGAGAAACCCTTTGCTTGTGACAT | |
| | TTGTGGCAGAAAGTTTGCCTATCACTGGTACCTTAAGAAGCACACCAAGATCCATACT | |
| | GGCTCTCAAAAGCCTTTCCAATGCCGAATATGTATGCGAAACTTTTCTAGGTCTGACTC | |
| | CCTCTCTGTACATATCCGCACTCACACGGGTGAAAAACCATTTGCCTGTGACATATGT | |
| | GGCAGAAAATTTGCTCAAAATGCGAACCGAAAAACGCATACGAAAATCCATTTGCGA | |
| | CAAAAAGATGCAGCTCGG | |
| 889 | GCGGCAATGGCAGAACGCCCGTTTCAGTGTAGAATCTGCATGCGCAATTTCTCCAGAA | ZFP |
| | GTGACGTACTCAGCACGCATATCAGAACACATACTGGTGAAAAACCGTTTGCTTGTGA | DNA |
| | TATCTGTGGTAAGAAATTCGCGGATAACTCCTCAAGGACGCGGCATACGAAGATCCAC | sequence |
| | ACTGGTTCTCAAAAGCCGTTCCAGTGCCGGATATGCATGCGGAACTTTAGTCGGCCAT | |
| | ATACGCTTCGACTTCATATTAGGACTCACACCGGCGAAAAGCCGTTCGCCTGTGACAT | |
| | TTGCGGGAGAAAATTCGCTGACTCTAGTCACCGCACGAGGCACACTAAAATACATACT | |
| | GGTTCACAAAAACCATTCCAGTGCCGAATTTGCATGCGAAATTTTTCCCGAAGTGACC | |
| | ATCTCTCACAGCACATCCGCACCCATACAGGGGAGAAGCCCTTCGCTTGTGATATATG | |
| | CGGACGCAAGTTCGCGGACAGCTCACACCGGACCCGCCATACAAAGATCCACTTGAG | |
| | ACAGAAAGATGCAGCGCGG | |
| 890 | GCCGCAATGGCCGAAAGACCATTTCAGTGCAGGATATGTATGCGCAACTTCTCTCGCA | ZFP |
| | GTGACCACCTGAGTCAACATATCAGGACACACACGGGTGAAAAGCCTTTTGCATGCGA | DNA |
| | TATTTGTGGTCGAAAATTTGCTCAGTCTGCGGACCGAACCAAGCACACTAAAATTCAT | sequence |
| | ACCGGCTCACAGAAACCGTTTCAATGCCGCATCTGTATGAGGAATTTCTCTAGATCAG | |
| | ACCACTTGTCCCAACACATCCGGACTCATACTGGAGAAAAGCCGTTTGCATGTGACAT | |
| | TTGTGGCAGGAAGTTTGCTAGAAGGTCTGACCTTAAAAGGCACACAAAAATTCATACG | |
| | GGTTCCCAGAAACCATTTCAGTGCCGGATATGCATGCGGAACTTTTCACGAAGCGACC | |
| | ACCTCTCCCGACATATTCGAACGCACACTGGTGAGAAGCCGTTTGCTTGCGACATTTG | |
| | CGGACGCAAGTTCGCTCAGAGCTCCGACTTGAGGAGGCATACCAAGATTCATCTCCGG | |
| | CAGAAAGATGCCGCGCGG | |
| 891 | GCCGCGATGGCTGAGAGACCATTTCAGTGTCGAATCTGCATGAGAAATTTTTCAAGGA | ZFP |
| | GTGACAATCTGTCTGAGCACATACGAACACATACTGGGGAAAAACCCTTTGCATGTGA | DNA |
| | CATTTGTGGAAGAAAGTTTGCTACCAGCTCAAATCGCAAAACACATACAAAGATACAT | sequence |
| | ACCGGCTCCCAAAAGCCATTCCAGTGCCGCATCTGCATGAGGAACTTTTCCGATCGCT | |
| | CACATCTTACCCGCCACATAAGAACTCACACAGGCGAAAAGCCCTTTGCCTGCGATAT | |
| | ATGCGGACGGAAGTTCGCCCGCTCCGACGCTTTGACCCAGCATACCAAAATCCATACT | |
| | GGGTCTCAAAAGCCATTTCAGTGCCGAATCTGTATGAGGAATTTCTCCGACAGGTCAG | |
| | CATTGGCACGGCATATCCGCACCCATACCGGTGAGAAGCCTTTTGCTTGCGATATCTG | |
| | TGGACGAAAATTTGCCCGGAGGTTCACTCTCTCCAAACACACAAAGATACATCTGCGC | |
| | CAAAAGGATGCAGCCCGG | |
| 892 | GCCGCAATGGCTGAGCGCCCGTTCCAGTGCAGAATATGCATGCGGAATTTTTCTAGGT | ZFP |
| | CAGATCATTTGTCTGAGCATATTCGCACACACACGGGAGAGAAGCCCTTTGCTTGCGA | DNA |
| | TATATGTGGAAGGAAATTCGCGCAATACAGTGGGCGCTACTACCATACAAAGATCCAT | sequence |
| | ACGGGCTCCCAGAAGCCCTTCCAATGTCGAATATGTATGAGGAATTTTAGTCACGGAC | |
| | AAACATTGAATGAACATATACGCACTCACACTGGTGAAAAACCATTTGCGTGCGATAT | |
| | TTGCGGAAGGAAGTTTGCTCAGTCTGGGAATTTGGCGCGACACACCAAGATCCACACA | |
| | GGATCCCAGAAACCATTTCAGTGCAGAATTTGTATGAGAAACTTTAGCCGCAGTGACA | |
| | GTCTCTTGAGGCACATACGGACTCATACTGGGGAGAAACCATTCGCCTGCGATATTTG | |
| | TGGACGAAAGTTCGCCTGTCGCGAGTACAGAGGCAAGCACACTAAGATACATCTTAG | |
| | GCAAAAGGACGCTGCACGG | |
| 893 | GCCGCGATGGCTGAGAGGCCTTTTCAATGTCGAATCTGTATGAGGAACTTCTCTCAAT | ZFP |
| | CTGCTAATCGCACGACGCACATTCGAACGCATACCGGTGAGAAGCCATTCGCGTGCGA | DNA |
| | TATCTGCGGACGGAAATTCGCGAGGTCAGCTAATCTTACACGGCACACGAAGATCCAC | sequence |
| | ACAGGGTCACAGAAACCTTTTCAGTGTCGCATTTGCATGAGGAATTTCTCCCGATCTG | |
| | ACGTCCTTAGCGAACATATACGAACTCACACGGGCGAGAAGCCATTTGCGTGCGATAT | |
| | ATGCGGGAGGAAGTTTGCCACCTCTGGACATCTGAGTCGACATACCAAAATTCATACC | |
| | GGTAGTCAGAAGCCGTTCCAATGCAGAATATGTATGCGAAATTTCTCTCAAAGCTCAG | |
| | ACTTGTCTAGGCACATAAGAACGCACACGGGTGAAAAACCTTTCGCGTGTGATATCTG | |
| | CGGCAGAAAGTTCGCACAATGGTCCACCCGAAAGCGGCATACGAAGATTCACCTCAG | |
| | ACAGAAAGACGCTGCCCGG | |
| 894 | GCGGCGATGGCAGAACGCCCGTTCCAATGCAGAATATGTATGAGAAACTTCTCCCAGA | ZFP |
| | GCGGAAATCTGGCACGCCACATCCGGACACACACGGGAGAGAAGCCATTTGCTTGTG | DNA |
| | ACATTTGTGGTCGCAAATTTGCCGCCACCTGTTGTCTGGCACATCATACTAAGATACAT | sequence |
| | ACGGGGTCACAGAAACCATTCCAATGTAGGATCTGCATGCGGAATTTTTCTCGGTGGC | |
| | AGTATTTGCCTACGCATATTAGAACCCACGCCGGTGAGAAACCGTTTGCATGTGACAT | |
| | CTGCGGACGAAAGTTTGCCGATAGATCTGCGCTTGCTAGGCATACTAAAATCCACACG | |
| | GGGTCCCAGAAGCCTTTTCAGTGTCGGATATGTATGAGGAACTTCAGTCGATCAGACA | |
| | ACCTTAGCGAGCATATTCGGACGCATACTGGAGAAAAACCTTTTGCTTGTGATATATG | |
| | CGGTAGGAAGTTCGCCAAACGGTGTAACCTTCGCTGTCACACCAAAATACATCTTCGC | |
| | CAGAAAGATGCGGCCCGG | |
| 895 | GCCGCTATGGCTGAAAGACCATTCCAGTGCAGAATATGTATGAGGAATTTTTCTAATC | ZFP |
| | CCGCGAACCTTACGCGCCATATCAGGACGCACACGGGCGAAAAGCCCTTCGCCTGCG | DNA |
| | ACATTTGTGGGAGAAAGTTTGCTCAAAACGCGACCAGGACAAAGCACACGAAAATTC | sequence |
| | ACACTGGTAGCCAGAAGCCGTTCCAGTGTAGGATCTGTATGCGCAATTTCTCTCAGTC | |
| | CGGGCACCTCGCGCGACACATAAGAACTCATACGGGGGAGAAGCCGTTTGCATGTGA | |
| | CATCTGCGGCCGCAAGTTTGCGAATAGGCATGACAGGGCAAAACATACGAAGATCCA | |
| | TACAGGTTCTCAAAAACCTTTCCAATGTCGAATATGCATGCGCAACTTTAGTCGGTCA | |
| | GACCACCTTTCTGAACACATCAGGACACACACTGGCGAAAAGCCGTTCGCATGTGACA | |
| | TTTGCGGCAGAAAGTTCGCACAAAGACGGTCCCGCTATAAGCACACCAAAATTCACCT | |
| | TAGGCAAAAGGATGCAGCTCGG | |
| 896 | GCGGCAATGGCAGAACGACCCTTCCAATGCCGCATATGTATGCGAAACTTCAGCCAGA | ZFP |
| | GCTCAGATCTTTCCAGACACATCAGGACTCACACTGGCGAAAAACCATTTGCATGCGA | DNA |
| | TATATGCGGGAGAAAATTCGCGCACCGCAGTACGCGAAACAGGCATACAAAGATACA | sequence |
| | TACTGGCAGTCAAAAGCCATTTCAATGTCGAATATGCATGAGGAACTTTAGTCGATCT | |
| | GACGTGCTGAGCGCTCACATACGGACCCATACCGGAGAGAAACCATTCGCTTGTGACA | |
| | TCTGTGGTAGGAAGTTCGCGGATTCCCGGACCCGCAAAAATCATACTAAAATTCACAC | |
| | TGGGTCTCAGAAGCCCTTTCAGTGTAGGATATGTATGCGCAATTTTAGCCAGAGTGGT | |
| | TCATTGACTCGGCATATCAGAACACATACTGGAGAGAAACCTTTCGCGTGTGATATTT | |
| | GCGGTCGAAAGTTCGCAGATCAGAGTGGACTTGCGCACCATACTAAGATCCACCTGAG | |
| | ACAGAAGGACGCTGCGCGG | |
| 897 | GCTGCCATGGCGGAGCGCCCTTTCCAGTGTAGGATATGTATGCGCAACTTCAGTCAGA | ZFP |
| | ACCCAGCCCAGTGGCGGCACATACGGACGCATACTGGAGAAAAGCCATTTGCATGTG | DNA |
| | ATATCTGCGGGCGAAAATTCGCGCGGTCAGCAGATTTGAGCCGGCATACGAAGATCC | sequence |
| | ATACAGGTTCACAAAAGCCATTTCAATGTCGGATATGTATGCGGAACTTCAGCACGTC | |
| | CGGCTCATTGTCAAGACATATACGAACTCATACCGGAGAGAAACCCTTCGCGTGCGAC | |
| | ATTTGCGGTCGGAAGTTCGCGCGATCCGACCATCTGTCACGACATACGAAAATACACA | |
| | CTGGCTCTCAAAAGCCGTTTCAGTGCAGAATTTGCATGAGAAATTTTAGCAGGAGCGA | |
| | CTCACTCCTTCGGCATATACGAACACACACTGGTGAGAAGCCATTTGCCTGTGATATTT | |
| | GTGGACGAAAGTTTGCGCAATCTTACGATAGGTTTCAGCATACAAAAATCCACCTTCG | |
| | GCAAAAGGACGCGGCACGG | |
| 898 | GCTGCCATGGCTGAACGACCGTTTCAATGTCGAATTTGCATGCGCAACTTCTCCACGTC | ZFP |
| | CGGGTCTCTCAGTAGACACATCAGAACGCATACTGGTGAAAAACCATTCGCTTGTGAC | DNA |
| | ATATGCGGCCGAAAATTCGCGCGGAGCGACCACCTGTCACGGCATACCAAAATTCAC | sequence |
| | ACCGGGAGTCAAAAACCGTTCCAGTGTAGGATATGTATGCGCAACTTCAGCCGGTCTG | |
| | ACAGTCTGCTTCGACATATTCGGACGCACACTGGTGAAAAGCCGTTTGCGTGCGACAT | |
| | TTGTGGTCGAAAGTTCGCTCAATCTTATGATAGGTTTCAACACACCAAAATACATACG | |
| | GGCTCCCAGAAGCCGTTCCAGTGCAGAATATGCATGAGAAATTTCTCTCGCAGTGACA | |
| | ATTTGTCCACCCATATTCGAACGCACACCGGCGAGAAACCCTTCGCCTGCGATATTTG | |
| | CGGTCGCAAGTTCGCAGACAACAGGGATAGGATAAAACATACGAAGATCCATCTGAG | |
| | GCAAAAAGACGCCGCCCGG | |
| 899 | GCAGCCATGGCAGAGCGGCCATTCCAGTGCAGAATCTGCATGCGGAACTTTTCCGATA | ZFP |
| | GGTCCAATCTGTCACGCCATATTAGGACACACACGGGTGAAAAACCGTTCGCGTGTGA | DNA |
| | CATATGCGGTCGCAAATTCGCCCTGAGACAGAACCTGATTATGCACACAAAAATACAT | sequence |
| | ACGGGAAGCCAGAAACCGTTCCAGTGTCGGATATGCATGAGGAACTTCAGTGAGAGG | |
| | GGGACTTTGGCGAGGCACATCAGGACTCACACTGGGGAGAAGCCCTTTGCATGTGATA | |
| | TCTGTGGCCGAAAATTTGCTCGATCAGATGCTCTCACCCAACATACAAAGATCCATAC | |
| | TGGCTCTCAAAAACCGTTTCAATGTAGAATTTGTATGCGCAACTTCTCTCGGTCAGATA | |
| | GCCTGTCCCAGCATATCCGAACTCATACAGGTGAGAAACCCTTCGCATGCGACATCTG | |
| | TGGGCGAAAATTTGCTAGAAAAGCAGACCGGACCCGACACACAAAGATTCATCTGCG | |
| | ACAAAAAGACGCCGCCCGG | |
| 900 | GCGGCCATGGCTGAGAGGCCTTTTCAATGTAGAATATGTATGCGAAATTTTTCACAGT | ZFP |
| | ACTGTTGTCTCACGAACCACATAAGGACTCATACAGGGGAGAAACCATTTGCCTGTGA | DNA |
| | CATTTGCGGTCGCAAATTTGCTACTTCTGGAAACCTGACTCGGCACACTAAGATTCAC | sequence |
| | ACAGGGTCCCAGAAGCCCTTCCAGTGTCGCATTTGCATGAGGAATTTTAGTCAAAGCT | |
| | CTGACTTGTCAAGGCATATTCGCACGCACACGGGCGAAAAGCCGTTCGCTTGCGACAT | |
| | ATGCGGGCGGAAATTTGCCTTCCGCTATTATTTGAAGAGACACACCAAGATACATACG | |
| | GGCTCTCAGAAGCCCTTTCAGTGTAGGATTTGCATGCGCAATTTTTCACAATCTGGTGA | |
| | TCTCACGCGACACATCCGGACTCACACAGGTGAAAAGCCTTTCGCGTGCGACATTTGC | |
| | GGCCGGAAGTTTGCTGACAAGGGCAACCTCACAAAGCATACGAAGATTCACTTGAGG | |
| | CAGAAAGATGCTGCTCGG | |
| 901 | GCCGCCATGGCCGAACGACCATTCCAGTGCAGGATATGTATGCGCAATTTTTCAACCA | ZFP |
| | GTGGTTCATTGTCACGACATATTAGAACACACACCGGTGAGAAACCCTTTGCGTGTGA | DNA |
| | CATCTGTGGGAGGAAATTCGCAAGATCTGACAACCTTACGACACATACAAAGATTCAC | sequence |
| | ACAGGCTCTCAAAAGCCCTTCCAGTGCCGAATTTGCATGCGAAACTTTTCCCAGTCTG | |
| | GTAATCTCGCTCGACATATCAGAACCCACACGGGGGAAAAACCATTCGCTTGTGATAT | |
| | TTGCGGACGAAAGTTCGCCGACAGAACCACACTCATGAGACACACTAAAATCCATACT | |
| | GGTAGTCAGAAGCCGTTTCAGTGTAGAATCTGCATGAGGAACTTTTCCCAGTCAGGCC | |
| | ACCTTGCAAGACATATACGAACTCACACTGGAGAAAAGCCGTTCGCCTGTGACATTTG | |
| | TGGGCGCAAGTTCGCGCAACTCACCCATCTGAATAGCCATACGAAGATTCACTTGAGA | |
| | CAGAAAGATGCGGCTCGG | |
| 902 | GCAGCTATGGCTGAACGCCCATTCCAGTGTCGGATCTGCATGCGCAACTTTTCTATAA | ZFP |
| | AACACGATCTTCACCGACACATTCGGACACATACTGGGGAGAAGCCCTTTGCGTGTGA | DNA |
| | CATCTGTGGCCGAAAGTTCGCTAGATCCGCAAACTTGACTCGGCATACGAAAATTCAC | sequence |
| | ACTGGAAGCCAGAAACCTTTCCAATGTCGAATCTGTATGAGGAACTTTAGCAGAAGTG | |
| | ATAATCTCGCCAGGCATATCCGAACGCACACAGGCGAGAAGCCATTCGCATGTGATAT | |
| | TTGTGGTAGAAAGTTCGCCCAAAATGTCTCTCGCCCACGCCATACTAAGATCCACACG | |
| | GGCTCCCAGAAGCCGTTCCAATGCCGCATTTGCATGCGAAACTTTTCCAGATCAGACG | |
| | ATCTGAGCAAGCATATTAGGACGCATACAGGGGAGAAGCCTTTTGCTTGCGACATTTG | |
| | CGGCCGGAAATTTGCTGACTCAAGTCACAGAACACGGCATACCAAGATACACCTTCGA | |
| | CAAAAAGATGCCGCACGG | |
| 903 | GCGGCCATGGCGGAACGACCCTTTCAGTGCCGAATTTGCATGAGGAACTTTTCACGAT | ZFP |
| | CTGATAACCTGGCGAGGCACATCCGAACACATACGGGCGAGAAGCCATTCGCATGTG | DNA |
| | ATATCTGCGGGCGAAAGTTCGCCCAAAATGTCAGTAGACCGCGACATACTAAAATAC | sequence |
| | ACACTGGCTCACAGAAGCCGTTCCAATGCCGCATCTGTATGCGCAATTTTTCCCGAAG | |
| | CGACGATCTGTCTAAACATATTCGGACGCACACTGGGGAAAAGCCTTTCGCTTGTGAC | |
| | ATCTGTGGGAGGAAGTTCGCTGACAGCTCTCATAGGACACGCCATACTAAGATTCATA | |
| | CCGGAAGCCAGAAGCCTTTCCAGTGTCGGATTTGCATGAGAAACTTTAGCACTTCTAG | |
| | CAACAGAAAGACACATATACGAACCCATACGGGTGAGAAACCGTTCGCATGCGATAT | |
| | CTGTGGGCGAAAATTTGCAGCCCAATGGACCAGAGCTTGCCATACCAAGATACACCTT | |
| | CGGCAGAAGGACGCTGCACGG | |
| 904 | GCTGCGATGGCAGAACGACCTTTTCAATGCCGAATTTGTATGAGGAACTTTTCCCGGT | ZFP |
| | CAGACGACCTTTCCAAGCACATCAGAACTCATACCGGAGAAAAACCGTTCGCCTGTGA | DNA |
| | CATTTGTGGACGGAAGTTTGCTGACTCCTCTCACAGGACTCGCCACACTAAGATACAC | sequence |
| | ACCGGAAGTCAGAAGCCCTTCCAATGTAGGATATGCATGAGAAACTTCAGTACGTCAT | |
| | CAAACCGAAAAACGCATATCAGGACACATACCGGCGAAAAGCCGTTTGCATGTGATA | |
| | TCTGCGGCAGGAAATTTGCAGCTCAGTGGACACGGGCATGTCACACAAAAATCCATAC | |
| | CGGTAGTCAAAAACCGTTTCAGTGTCGAATCTGCATGAGGAACTTTAGCCGGAAGCAG | |
| | ACGAGAACCACGCATATAAGAACTCACACAGGTGAGAAACCCTTTGCGTGCGATATCT | |
| | GCGGTCGCAAATTTGCTCACCGATCCTCCCTGAGGCGACATACTAAAATACATCTGCG | |
| | ACAGAAAGACGCGGCTCGG | |
| 905 | GCCGCCATGGCAGAACGGCCTTTTCAGTGTCGGATCTGCATGAGAAACTTTAGTCAGA | ZFP |
| | GTGCCCATCGCAAGAATCATATTCGAACTCATACCGGTGAAAAACCGTTCGCGTGCGA | DNA |
| | CATCTGTGGTCGAAAGTTTGCCACATCATCCAATAGAAAAACGCATACTAAGATTCAT | sequence |
| | ACCGGTAGCCAGAAACCATTCCAATGTAGAATCTGCATGCGAAATTTCAGCAGGAGTG | |
| | ACAATTTGTCCGCACATATACGGACACACACGGGCGAAAAACCCTTTGCTTGCGATAT | |
| | ATGCGGTAGAAAGTTCGCTAGGAACAACGACCGAAAAACACACACGAAGATTCATAC | |
| | AGGTAGTCAGAAGCCATTTCAATGTCGGATCTGTATGCGAAATTTCTCTACTTCTGGCA | |
| | GCCTGTCCCGGCACATCAGAACACATACCGGTGAGAAGCCATTTGCATGTGACATATG | |
| | TGGGAGAAAATTTGCCCAGGCGGGTCACCTTGCGAAGCATACAAAGATCCACCTCCGC | |
| | CAGAAGGACGCCGCACGG | |
| 906 | GCGGCTATGGCAGAGCGGCCATTCCAATGTAGGATATGTATGAGGAACTTCTCCCGGA | ZFP |
| | GCGATCACCTGTCCCAACACATCCGCACGCATACGGGTGAGAAGCCGTTTGCTTGTGA | DNA |
| | TATCTGCGGAAGAAAATTTGCAGCATCCAGTACACGCACAAAGCATACGAAGATTCAT | sequence |
| | ACGGGATCCCAAAAGCCCTTTCAATGCAGGATTTGTATGAGGAACTTCAGTCGGTCCG | |
| | ACGATCTGACACGACATATTAGAACTCATACTGGAGAGAAGCCATTCGCATGTGACAT | |
| | CTGCGGTAGGAAGTTCGCGCAGAAATCTAACCTGTCATCTCACACCAAGATACATACA | |
| | GGCTCACAGAAGCCGTTTCAATGCCGCATCTGCATGAGGAATTTCAGCCAGTCCGCAA | |
| | ACAGAACTACGCATATTCGGACGCATACCGGCGAGAAGCCGTTTGCCTGCGACATTTG | |
| | CGGGAGGAAATTCGCACAGAACGCGACCAGAACCAAACACACCAAAATCCATCTTAG | |
| | GCAAAAGGATGCGGCCCGG | |
| 907 | GCGGCCATGGCAGAACGACCCTTTCAGTGCCGAATTTGCATGCGGAACTTTAGTCGCA | ZFP |
| | GTGACACCCTGAGCGAGCATATTCGCACGCATACGGGAGAGAAGCCATTTGCATGCG | DNA |
| | ACATCTGCGGTAGAAAGTTTGCGAGGCGCTGGACGTTGGTAGGCCACACGAAAATCC | sequence |
| | ATACAGGCTCCCAGAAACCCTTCCAGTGCAGAATTTGTATGCGCAATTTTAGTGACAG | |
| | AAGTAACTTGTCCCGACATATAAGGACGCACACCGGCGAAAAACCGTTTGCCTGTGAT | |
| | ATCTGTGGTCGGAAATTCGCCCAGTCCGGTGACTTGACACGGCATACCAAAATACACA | |
| | CTGGAAGCCAAAAGCCTTTTCAGTGTCGCATATGTATGCGCAACTTCAGCCAGAGTAG | |
| | TGACCTTTCACGGCATATACGGACGCATACGGGTGAGAAACCCTTCGCCTGTGACATT | |
| | TGCGGGCGAAAGTTTGCATATCATTGGTACCTGAAAAAACATACGAAAATACATTTGA | |
| | GACAAAAAGATGCAGCCCGG | |
| 908 | GCTGCCATGGCCGAGCGCCCGTTTCAATGCAGAATATGTATGAGGAACTTCTCTAGAA | ZFP |
| | GCGCCAATCTTGCGCGACACATTAGAACTCACACAGGCGAGAAACCTTTCGCCTGTGA | DNA |
| | CATCTGCGGCAGAAAATTTGCGCGAAGTGATAACTTGCGCGAGCACACAAAAATCCA | sequence |
| | TACCGGTTCCCAAAAGCCCTTTCAATGTAGGATTTGCATGAGGAACTTTTCAAGACCA | |
| | TACACGCTGAGACTCCACATTCGCACGCATACGGGAGAAAAACCATTTGCTTGTGACA | |
| | TATGCGGCCGAAAGTTTGCACACCGATCCAACTTGAATAAGCATACCAAAATCCATAC | |
| | GGGGTCTCAGAAACCCTTCCAGTGTCGGATTTGTATGCGAAACTTCTCTCAGAGTGGT | |
| | TCTCTTACGCGCCACATTAGAACCCACACGGGGGAAAAGCCATTCGCGTGCGATATCT | |
| | GTGGCCGGAAATTTGCTACTTCCGCAAATCTTTCTCGACATACAAAGATACATCTTAG | |
| | ACAGAAGGATGCGGCACGG | |
| 909 | TTGGAGCCCGGTGAAAAACCATATGCCTGTCCAGAGTGTGGAAAAAGTTTTAGCAGA | ZFP |
| | AGCGACGACCTGGTTAGGCATCAACGAACTCACACAGGGGAAAAGCCGTACAAATGT | DNA |
| | CCTGAATGCGGAAAGTCATTCTCCACTTCAGGTAGCCTCGTGCGACATCAGCGCACAC | sequence |
| | ATACTGGCGAAAAACCTTATAAGTGTCCGGAATGCGGCAAGAGTTTTTCTAGAAGTGA | |
| | TAAGCTCGTGCGACACCAGCGGACGCACACGGGTGAGAAGCCCTACGCCTGCCCAGA | |
| | GTGCGGAAAGTCCTTTAGTAGGTCTGACGAACTGGTCCGGCACCAACGAACCCATACA | |
| | GGGGAGAAACCCTACAAATGTCCAGAGTGCGGGAAATCATTTTCAACGTCTCACAGCT | |
| | TGACGGAACATCAGAGGACCCATACAGGCGAAAAGCCTTACAAATGTCCGGAGTGCG | |
| | GAAAGTCTTTCAGCCGGGCTGATAATCTCACGGAGCACCAAAGAACCCACACGGGTA | |
| | AGAAAACCTCT | |
| 910 | TTGGAGCCGGGAGAAAAGCCATATGCCTGTCCGGAATGCGGCAAAAGCTTTTCAGAA | ZFP |
| | CGGTCCCATTTGCGGGAACATCAGCGCACCCATACCGGAGAAAAGCCTTACAAGTGTC | DNA |
| | CCGAGTGTGGTAAGAGCTTTTCAACTTCCCACAGTCTCACTGAACATCAGCGAACTCA | sequence |
| | CACAGGCGAAAAACCATACAAATGCCCGGAGTGTGGAAAGAGTTTTTCTCAAGCTGG | |
| | GCACTTGGCCAGCCACCAAAGGACTCATACGGGCGAGAAACCGTATGCCTGTCCAGA | |
| | ATGCGGGAAATCATTTTCTACTAGTCATTCCCTTACGGAACATCAGAGAACGCACACC | |
| | GGGGAGAAGCCATACAAGTGTCCGGAGTGCGGAAAATCATTCTCCGACCCGGGTCAT | |
| | CTCGTTCGCCATCAGAGGACTCATACTGGAGAGAAACCGTATAAATGTCCTGAATGCG | |
| | GGAAGAGCTTTTCTACATCTGGGAACCTTGTGCGGCACCAGCGAACCCACACGGGGA | |
| | AAAAGACTTCT | |
| 911 | CTGGAACCGGGTGAAAAACCCTACGCTTGTCCCGAGTGTGGGAAATCATTCTCAAGGG | ZFP |
| | CAGATAATCTTACGGAACATCAGCGCACACACACCGGGGAAAAACCCTATAAGTGCC | DNA |
| | CTGAGTGTGGTAAATCATTCTCTACGTCAGGGTCATTGGTGCGCCATCAGAGGACCCA | sequence |
| | TACAGGCGAAAAACCGTATAAGTGCCCCGAATGCGGTAAAAGCTTCAGCAGAAAAGA | |
| | TAACTTGAAAAATCACCAACGCACTCACACGGGAGAAAAACCGTACGCATGCCCGGA | |
| | GTGCGGCAAGAGTTTCAGTCAGAGTAGCTCACTTGTTCGCCACCAAAGAACCCACACA | |
| | GGCGAAAAGCCCTACAAGTGTCCTGAATGTGGAAAGAGTTTCAGTCGAAGTGATAAA | |
| | TTGGTTAGGCACCAAAGAACACACACTGGAGAGAAACCGTACAAGTGTCCAGAATGT | |
| | GGCAAGTCTTTTTCTGATTCTGGAAATTTGCGCGTCCATCAAAGGACTCATACTGGGA | |
| | AAAAGACGTCC | |
| 912 | CTCGAACCAGGGGAAAAGCCATACGCTTGCCCCGAGTGTGGAAAATCTTTCTCTCAGT | ZFP |
| | CAAGCTCCCTTGTCAGACACCAGAGAACCCATACGGGTGAGAAACCATACAAGTGCC | DNA |
| | CAGAGTGCGGCAAAAGCTTCAGTCAGAGTGGCGATCTGCGCCGGCATCAAAGAACTC | sequence |
| | ACACTGGAGAAAAGCCCTATAAGTGCCCCGAATGTGGAAAGAGTTTTTCCAGGAGTG | |
| | ACGAAAGAAAGAGACACCAGCGGACTCACACCGGCGAGAAACCATACGCATGCCCCG | |
| | AGTGCGGAAAAAGTTTTTCCCACCGCACAACCCTTACCAATCATCAACGCACGCACAC | |
| | AGGGGAGAAACCCTACAAGTGCCCGGAGTGTGGCAAGTCATTCAGCCGAAGTGACCA | |
| | CCTCACTAACCACCAAAGGACTCACACAGGAGAAAAACCCTACAAATGTCCGGAGTG | |
| | CGGAAAATCTTTTTCCACGTCCGGTGAGCTGGTCCGCCATCAACGAACCCATACTGGT | |
| | AAAAAAACTAGC | |
| 913 | CTGGAACCCGGGGAGAAGCCGTACGCTTGCCCAGAGTGCGGAAAGAGCTTCTCTCAG | ZFP |
| | AGCGGAGACCTTAGACGCCACCAGCGAACCCACACCGGCGAAAAACCGTATAAATGC | DNA |
| | CCGGAATGCGGCAAGAGTTTTAGTCGGTCCGATGAGCGAAAGAGGCATCAACGAACC | sequence |
| | CATACGGGAGAGAAACCCTACAAGTGCCCTGAGTGTGGTAAGTCATTTTCCCACAGAA | |
| | CGACGTTGACGAATCACCAGAGAACCCATACGGGTGAGAAACCTTACGCTTGCCCGG | |
| | AGTGCGGCAAAAGCTTCAGCCGGAGTGATCACTTGACCAATCATCAGAGGACACACA | |
| | CGGGTGAGAAGCCCTACAAATGTCCCGAATGCGGCAAGTCTTTCTCAACGTCAGGCGA | |
| | ACTCGTCCGGCACCAGCGAACACATACGGGAGAAAAGCCGTACAAATGTCCGGAATG | |
| | CGGAAAGTCATTTTCACGGTCAGATGACTTGGTGCGACACCAGCGCACTCACACAGGC | |
| | AAGAAGACCTCA | |
| 914 | CTGGAGCCTGGTGAGAAGCCGTATGCATGTCCTGAGTGTGGGAAGTCATTTAGTCAGA | ZFP |
| | GGGCCCACTTGGAACGACACCAAAGGACCCACACTGGTGAAAAACCCTACAAATGCC | DNA |
| | CAGAGTGTGGTAAGTCTTTTTCACAGCTGGCCCACCTGAGAGCACACCAGCGAACTCA | sequence |
| | TACGGGCGAGAAACCATACAAGTGTCCAGAGTGCGGAAAGTCATTCTCAGATCCCGG | |
| | CCACTTGGTGCGACATCAGAGAACGCACACAGGGGAGAAGCCTTATGCTTGCCCGGA | |
| | ATGCGGGAAGTCTTTCAGCCGCCGAAGTGCTTGTCGAAGGCACCAACGGACCCATACC | |
| | GGTGAGAAACCATATAAGTGCCCAGAGTGTGGAAAGAGTTTTAGTCGATCCGATCACC | |
| | TGACTACGCACCAGCGGACGCACACAGGAGAGAAACCGTATAAGTGCCCTGAATGCG | |
| | GTAAGAGCTTCTCTCAATCAAGCTCACTGGTTAGGCACCAACGCACTCATACCGGCAA | |
| | GAAGACGTCA | |
| 915 | CTTGAGCCGGGGGAAAAGCCTTATGCTTGCCCAGAGTGTGGCAAGAGCTTCTCCCAAA | ZFP |
| | GTTCAAACCTCGTCCGACACCAAAGGACTCACACGGGCGAAAAACCGTATAAATGCC | DNA |
| | CCGAGTGCGGAAAGTCATTTTCCAGGTCCGACGATCTGGTCCGCCACCAGCGCACTCA | sequence |
| | TACGGGGGAAAAGCCCTATAAGTGCCCTGAGTGCGGCAAGAGCTTCTCAACTCACCTG | |
| | GATCTCATTCGCCATCAACGCACACATACAGGGGAGAAGCCTTACGCTTGTCCAGAGT | |
| | GCGGCAAGTCTTTCAGTACGAGCGGAAACCTGACGGAACACCAGCGAACCCACACGG | |
| | GCGAGAAGCCATATAAATGTCCCGAATGTGGAAAATCATTCTCTCGCCGATCTGCGTG | |
| | CCGCCGGCATCAGAGGACACATACCGGAGAAAAGCCGTACAAATGCCCCGAGTGTGG | |
| | AAAATCCTTTAGCAGAAATGATACACTTACCGAGCATCAGAGGACGCACACTGGAAA | |
| | AAAGACATCT | |

[0307] In some embodiments, the eZFP (e.g., such as an eZFP comprised in a fusion protein of an epigenetic-modifying DNA-targeting system) comprises zinc finger proteins comprising six zinc fingers denoted F1 through F6 in order from N-terminus to C-terminus. In some embodiments, the amino acid sequence of each zinc finger recognition region is as follows: 1) F1:SEADRSR(SEQ ID NO:720) F2:DRSNLTR(SEQ ID NO:721)F3:QSSDLSR(SEQ ID NO:722) F4:YHWYLKK(SEQ ID NO:723) F5:RSDSLSV(SEQ ID NO:724) F6:QNANRKT(SEQ ID NO:725); 2) F1:RSDVLST(SEQ ID NO:726) F2:DNSSRTR(SEQ ID NO:727) F3:RPYTLRL(SEQ ID NO:728) F4:DSSHRTR(SEQ ID NO:729) F5:RSDHLSQ(SEQ ID NO:730) F6:DSSHRTR(SEQ ID NO:731); 3) F1:RSDHLSQ(SEQ ID NO:732) F2:QSADRTK(SEQ ID NO:733) F3:RSDHLSQ(SEQ ID NO:734) F4:RRSDLKR(SEQ ID NO:735) F5:RSDHLSR(SEQ ID NO:736) F6:QSSDLRR(SEQ ID NO:737); 4) F1:RSDNLSE(SEQ ID NO:738) F2:TSSNRKT(SEQ ID NO:739) F3:DRSHLTR(SEQ ID NO:740) F4:RSDALTQ(SEQ ID NO:741) F5:DRSALAR(SEQ ID NO:742) F6:RRFTLSK(SEQ ID NO:743); 5) F1:RSDHLSE(SEQ ID NO:744) F2:QYSGRYY(SEQ ID NO:745) F3:HGQTLNE(SEQ ID NO:746) F4:QSGNLAR(SEQ ID NO:747) F5:RSDSLLR(SEQ ID NO:748) F6:CREYRGK(SEQ ID NO:749); 6) F1:QSANRTT(SEQ ID NO:750) F2:RSANLTR(SEQ ID NO:751) F3:RSDVLSE(SEQ ID NO:752) F4:TSGHLSR(SEQ ID NO:753) F5:QSSDLSR(SEQ ID NO:754), F6:QWSTRKR(SEQ ID NO:755); 7) F1:QSGNLAR(SEQ ID NO:756) F2:ATCCLAH(SEQ ID NO:757) F3:RWQYLPT(SEQ ID NO:758) F4:DRSALAR(SEQ ID NO:759) F5:RSDNLSE(SEQ ID NO:760)F6:KRCNLRC(SEQ ID NO:761); 8) F1:NPANLTR(SEQ ID NO:762) F2:QNATRTK(SEQ ID NO:763) F3:QSGHLAR(SEQ ID NO:764) F4:NRHDRAK(SEQ ID NO:765) F5:RSDHLSE(SEQ ID NO:766), F6:QRRSRYK(SEQ ID NO:767); 9) F1:QSSDLSR(SEQ ID NO:768) F2:HRSTRNR(SEQ ID NO:769) F3:RSDVLSA(SEQ ID NO:770) F4:DSRTRKN(SEQ ID NO:771) F5:QSGSLTR(SEQ ID NO:772) F6:DQSGLAH(SEQ ID NO:773); 10) F1:QNPAQWR(SEQ ID NO:774) F2:RSADLSR(SEQ ID NO:775) F3:TSGSLSR(SEQ ID NO:776) F4:RSDHLSR(SEQ ID NO:777) F5:RSDSLLR(SEQ ID NO:778) F6:QSYDRFQ(SEQ ID NO:779); 11) F1:TSGSLSR(SEQ ID NO:780) F2:RSDHLSR(SEQ ID NO:781) F3:RSDSLLR(SEQ ID NO:782) F4:QSYDRFQ(SEQ ID NO:783) F5:RSDNLST(SEQ ID NO:784) F6:DNRDRIK(SEQ ID NO:785); 12) F1:DRSNLSR(SEQ ID NO:786) F2:LRQNLIM(SEQ ID NO:787) F3:ERGTLAR(SEQ ID NO:788) F4:RSDALTQ(SEQ ID NO:789) F5:RSDSLSQ(SEQ ID NO:790) F6:RKADRTR(SEQ ID NO:791); 13) F1:QYCCLTN(SEQ ID NO:792) F2:TSGNLTR(SEQ ID NO:793) F3:QSSDLSR(SEQ ID NO:794) F4:FRYYLKR(SEQ ID NO:795) F5:QSGDLTR(SEQ ID NO:796) F6:DKGNLTK(SEQ ID NO:797); 14) F1:TSGSLSR(SEQ ID NO:798) F2:RSDNLTT(SEQ ID NO:799) F3:QSGNLAR(SEQ ID NO:800) F4:DRTTLMR(SEQ ID NO:801) F5:QSGHLAR(SEQ ID NO:802) F6:QLTHLNS(SEQ ID NO:803); 15) F1:IKHDLHR(SEQ ID NO:804) F2:RSANLTR(SEQ ID NO:805) F3:RSDNLAR(SEQ ID NO:806) F4:QNVSRPR(SEQ ID NO:807) F5:RSDDLSK(SEQ ID NO:808) F6:DSSHRTR(SEQ ID NO:809); 16) F1:RSDNLAR(SEQ ID NO:810) F2:QNVSRPR(SEQ ID NO:811) F3:RSDDLSK(SEQ ID NO:812) F4:DSSHRTR(SEQ ID NO:813) F5:TSSNRKT(SEQ ID NO:814) F6:AQWTRAC(SEQ ID NO:815); 17) F1:RSDDLSK(SEQ ID NO:816) F2:DSSHRTR(SEQ ID NO:817) F3:TSSNRKT(SEQ ID NO:818) F4:AQWTRAC(SEQ ID NO:819) F5:RKQTRTT(SEQ ID NO:820) F6:HRSSLRR(SEQ ID NO:821); 18) F1:QSAHRKN(SEQ ID NO:822) F2:TSSNRKT(SEQ ID NO:823) F3:RSDNLSA(SEQ ID NO:824) F4:RNNDRKT(SEQ ID NO:825) F5:TSGSLSR(SEQ ID NO:826) F6:QAGHLAK(SEQ ID NO:827); 19) F1:RSDHLSQ(SEQ ID NO:828) F2:ASSTRTK(SEQ ID NO:829) F3:RSDDLTR(SEQ ID NO:830) F4:QKSNLSS(SEQ ID NO:831) F5:QSANRTT(SEQ ID NO:832) F6:QNATRTK(SEQ ID NO:833); 20) F1:RSDTLSE(SEQ ID NO:834) F2:RRWTLVG(SEQ ID NO:835) F3:DRSNLSR(SEQ ID NO:836) F4:QSGDLTR(SEQ ID NO:837) F5:QSSDLSR(SEQ ID NO:838) F6:YHWYLKK(SEQ ID NO:839); 21) F1:RSANLAR(SEQ ID NO:840) F2:RSDNLRE(SEQ ID NO:841) F3:RPYTLRL(SEQ ID NO:842) F4:HRSNLNK(SEQ ID NO:843) F5:QSGSLTR(SEQ ID NO:844) F6:TSANLSR(SEQ ID NO:845); m22) F1:RSDDLVR(SEQ ID NO:846) F2:TSGSLVR(SEQ ID NO:847) F3:RSDKLVR(SEQ ID NO:848) F4:RSDELVR(SEQ ID NO:849) F5:TSHSLTE(SEQ ID NO:850) F6:RADNLTE(SEQ ID NO:851); 23) F1:ERSHLRE(SEQ ID NO:852) F2:TSHSLTE(SEQ ID NO:853) F3:QAGHLAS(SEQ ID NO:854) F4:TSHSLTE(SEQ ID NO:855) F5:DPGHLVR(SEQ ID NO:856) F6:TSGNLVR(SEQ ID NO:857); 24) F1:RADNLTE(SEQ ID NO:858) F2:TSGSLVR(SEQ ID NO:859) F3:RKDNLKN(SEQ ID NO:860) F4:QSSSLVR(SEQ ID NO:861) F5:RSDKLVR(SEQ ID NO:862) F6:DSGNLRV(SEQ ID NO:863); 25) F1:QSSSLVR(SEQ ID NO:864) F2:QSGDLRR(SEQ ID NO:865) F3:RSDERKR(SEQ ID NO:866) F4:HRTTLTN(SEQ ID NO:867) F5:RSDHLTN(SEQ ID NO:868) F6:TSGELVR(SEQ ID NO:869); 26) F1:QSGDLRR(SEQ ID NO:870) F2:RSDERKR(SEQ ID NO:871) F3:HRTTLTN(SEQ ID NO:872) F4:RSDHLTN(SEQ ID NO:873) F5:TSGELVR(SEQ ID NO:874) F6:RSDDLVR(SEQ ID NO:875); 27) F1:QRAHLER(SEQ ID NO:876) F2:QLAHLRA(SEQ ID NO:877) F3:DPGHLVR(SEQ ID NO:878) F4:RRSACRR(SEQ ID NO:879) F5:RSDHLTT(SEQ ID NO:880) F6:QSSSLVR(SEQ ID NO:881); and 28) F1:QSSNLVR(SEQ ID NO:882) F2:RSDDLVR(SEQ ID NO:883) F3:THLDLIR(SEQ ID NO:884) F4:TSGNLTE(SEQ ID NO:885) F5:RRSACRR(SEQ ID NO:886) F6:RNDTLTE(SEQ ID N0.887).

[0308] In some embodiments, the eZFP (e.g., such as an eZFP comprised in a fusion protein of an epigenetic-modifying DNA-targeting system) comprises sequence set forth in any one of SEQ ID NOS: 692-719, or a portion thereof, or an amino acid sequence that has at least 90%, 91%, 92%, 93%, 94%, 95%, 96%, 97%, 98%, or 99% sequence identity thereto. In some embodiments, the eZFP is encoded by the sequence set forth in any one of SEQ ID NOS:888-915, or a portion thereof, or nucleotide sequence that has at least 90%, 91%, 92%, 93%, 94%, 95%, 96%, 97%, 98%, or 99% sequence identity thereto.

[0309] In some embodiments, provided herein is an eZFP (e.g., such as an eZFP comprised in a fusion protein of an epigenetic-modifying DNA-targeting system), such as eZFP_1 as described herein. In some embodiments, the eZFP targets a target site comprising the nucleotide sequence set forth in SEQ ID NO:1028, a contiguous portion thereof of at least 12 nt, or a complementary sequence of any of the foregoing. In some embodiments, the eZFP targets a target site comprising the nucleotide sequence set forth in SEQ ID NO:1028. In some embodiments, the eZFP comprises six zinc fingers denoted F1 through F6 in order from N-terminus to C-terminus, each comprising a corresponding zinc finger recognition region F1 through F6, and the amino acid sequence of each zinc finger recognition region is as follows: F1:SEADRSR(SEQ ID NO:720) F2:DRSNLTR(SEQ ID NO:721) F3:QSSDLSR(SEQ ID NO:722) F4:YHWYLKK(SEQ ID NO:723) F5:RSDSLSV(SEQ ID NO:724) F6:QNANRKT(SEQ ID NO:725): In some embodiments, the eZFP comprises the amino acid sequence set forth in SEQ ID NO:692, or a portion thereof, or an amino acid sequence that has at least 90%, 91%, 92%, 93%, 94%, 95%, 96%, 97%, 98%, or 99% sequence identity thereto. In some embodiments, the eZFP comprises the amino acid sequence set forth in SEQ ID NO:692. In some embodiments, the eZFP is encoded by the nucleotide sequence set forth in SEQ ID NO:888, or a nucleotide sequence that has at least 90%, 91%, 92%, 93%, 94%, 95%, 96%, 97%, 98%, or 99% sequence identity thereto. In some embodiments, the eZFP is encoded by the nucleotide sequence set forth in SEQ ID NO:888.

[0310] In some embodiments, provided herein is an eZFP (e.g., such as an eZFP comprised in a fusion protein of an epigenetic-modifying DNA-targeting system), such as eZFP_2 as described herein. In some embodiments, the eZFP targets a target site comprising the nucleotide sequence set forth in SEQ ID NO:1029, a contiguous portion thereof of at least 12 nt, or a complementary sequence of any of the foregoing. In some embodiments, the eZFP targets a target site comprising the nucleotide sequence set forth in SEQ ID NO:1029. In some embodiments, the eZFP comprises six zinc fingers denoted F1 through F6 in order from N-terminus to C-terminus, each comprising a corresponding zinc finger recognition region F1 through F6, and the amino acid sequence of each zinc finger recognition region is as follows: F1:RSDVLST(SEQ ID NO:726) F2:DNSSRTR(SEQ ID NO:727) F3:RPYTLRL(SEQ ID NO:728) F4:DSSHRTR(SEQ ID NO:729) F5:RSDHLSQ(SEQ ID NO:730) F6:DSSHRTR(SEQ ID NO:731). In some embodiments, the eZFP comprises the amino acid sequence set forth in SEQ ID NO:693, or a portion thereof, or an amino acid sequence that has at least 90%, 91%, 92%, 93%, 94%, 95%, 96%, 97%, 98%, or 99% sequence identity thereto. In some embodiments, the eZFP comprises the amino acid sequence set forth in SEQ ID NO:693. In some embodiments, the eZFP is encoded by the nucleotide sequence set forth in SEQ ID NO:889, or a nucleotide sequence that has at least 90%, 91%, 92%, 93%, 94%, 95%, 96%, 97%, 98%, or 99% sequence identity thereto. In some embodiments, the eZFP is encoded by the nucleotide sequence set forth in SEQ ID NO:889.

[0311] In some embodiments, provided herein is an eZFP (e.g., such as an eZFP comprised in a fusion protein of an epigenetic-modifying DNA-targeting system), such as eZFP_3 as described herein. In some embodiments, the eZFP targets a target site comprising the nucleotide sequence set forth in SEQ ID NO:1030, a contiguous portion thereof of at least 12 nt, or a complementary sequence of any of the foregoing. In some embodiments, the eZFP targets a target site comprising the nucleotide sequence set forth in SEQ ID NO:1030. In some embodiments, the eZFP comprises six zinc fingers denoted F1 through F6 in order from N-terminus to C-terminus, each comprising a corresponding zinc finger recognition region F1 through F6, and the amino acid sequence of each zinc finger recognition region is as follows: F1:RSDHLSQ(SEQ ID NO:732) F2:QSADRTK(SEQ ID NO:733) F3:RSDHLSQ(SEQ ID NO:734) F4:RRSDLKR(SEQ ID NO:735) F5:RSDHLSR(SEQ ID NO:736) F6:QSSDLRR(SEQ ID NO:737). In some embodiments, the eZFP comprises the amino acid sequence set forth in SEQ ID NO:694, or a portion thereof, or an amino acid sequence that has at least 90%, 91%, 92%, 93%, 94%, 95%, 96%, 97%, 98%, or 99% sequence identity thereto. In some embodiments, the eZFP comprises the amino acid sequence set forth in SEQ ID NO:694. In some embodiments, the eZFP is encoded by the nucleotide sequence set forth in SEQ ID NO:890, or a nucleotide sequence that has at least 90%, 91%, 92%, 93%, 94%, 95%, 96%, 97%, 98%, or 99% sequence identity thereto. In some embodiments, the eZFP is encoded by the nucleotide sequence set forth in SEQ ID NO:890.

[0312] In some embodiments, provided herein is an eZFP (e.g., such as an eZFP comprised in a fusion protein of an epigenetic-modifying DNA-targeting system), such as eZFP_4 as described herein. In some embodiments, the eZFP targets a target site comprising the nucleotide sequence set forth in SEQ ID NO:1031, a contiguous portion thereof of at least 12 nt, or a complementary sequence of any of the foregoing. In some embodiments, the eZFP targets a target site comprising the nucleotide sequence set forth in SEQ ID NO:1031. In some embodiments, the eZFP comprises six zinc fingers denoted F1 through F6 in order from N-terminus to C-terminus, each comprising a corresponding zinc finger recognition region F1 through F6, and the amino acid sequence of each zinc finger recognition region is as follows: F1:RSDNLSE(SEQ ID NO:738) F2:TSSNRKT(SEQ ID NO:739) F3:DRSHLTR(SEQ ID NO:740) F4:RSDALTQ(SEQ ID NO:741) F5:DRSALAR(SEQ ID NO:742) F6:RRFTLSK(SEQ ID NO:743). In some embodiments, the eZFP comprises the amino acid sequence set forth in SEQ ID NO:695, or a portion thereof, or an amino acid sequence that has at least 90%, 91%, 92%, 93%, 94%, 95%, 96%, 97%, 98%, or 99% sequence identity thereto. In some embodiments, the eZFP comprises the amino acid sequence set forth in SEQ ID NO:695. In some embodiments, the eZFP is encoded by the nucleotide sequence set forth in SEQ ID NO:891, or a nucleotide sequence that has at least 90%, 91%, 92%, 93%, 94%, 95%, 96%, 97%, 98%, or 99% sequence identity thereto. In some embodiments, the eZFP is encoded by the nucleotide sequence set forth in SEQ ID NO:891.

[0313] In some embodiments, provided herein is an eZFP (e.g., such as an eZFP comprised in a fusion protein of an epigenetic-modifying DNA-targeting system), such as eZFP_5 as described herein. In some embodiments, the eZFP targets a target site comprising the nucleotide sequence set forth in SEQ ID NO:1032, a contiguous portion thereof of at least 12 nt, or a complementary sequence of any of the foregoing. In some embodiments, the eZFP targets a target site comprising the nucleotide sequence set forth in SEQ ID NO:1032. In some embodiments, the eZFP comprises six zinc fingers denoted F1 through F6 in order from N-terminus to C-terminus, each comprising a corresponding zinc finger recognition region F1 through F6, and the amino acid sequence of each zinc finger recognition region is as follows: F1:RSDHLSE(SEQ ID NO:744) F2:QYSGRYY(SEQ ID NO:745) F3:HGQTLNE(SEQ ID NO:746) F4:QSGNLAR(SEQ ID NO:747) F5:RSDSLLR(SEQ ID NO:748) F6:CREYRGK(SEQ ID NO:749). In some embodiments, the eZFP comprises the amino acid sequence set forth in SEQ ID NO:696, or a portion thereof, or an amino acid sequence that has at least 90%, 91%, 92%, 93%, 94%, 95%, 96%, 97%, 98%, or 99% sequence identity thereto. In some embodiments, the eZFP comprises the amino acid sequence set forth in SEQ ID NO:696. In some embodiments, the eZFP is encoded by the nucleotide sequence set forth in SEQ ID NO:892, or a nucleotide sequence that has at least 90%, 91%, 92%, 93%, 94%, 95%, 96%, 97%, 98%, or 99% sequence identity thereto. In some embodiments, the eZFP is encoded by the nucleotide sequence set forth in SEQ ID NO:892.

[0314] In some embodiments, provided herein is an eZFP (e.g., such as an eZFP comprised in a fusion protein of an epigenetic-modifying DNA-targeting system), such as eZFP_6 as described herein. In some embodiments, the eZFP targets a target site comprising the nucleotide sequence set forth in SEQ ID NO:1033, a contiguous portion thereof of at least 12 nt, or a complementary sequence of any of the foregoing. In some embodiments, the eZFP targets a target site comprising the nucleotide sequence set forth in SEQ ID NO:1033. In some embodiments, the eZFP comprises six zinc fingers denoted F1 through F6 in order from N-terminus to C-terminus, each comprising a corresponding zinc finger recognition region F1 through F6, and the amino acid sequence of each zinc finger recognition region is as follows: F1:QSANRTT(SEQ ID NO:750) F2:RSANLTR(SEQ ID NO:751) F3:RSDVLSE(SEQ ID NO:752) F4:TSGHLSR(SEQ ID NO:753) F5:QSSDLSR(SEQ ID NO:754) F6:QWSTRKR(SEQ ID NO:755). In some embodiments, the eZFP comprises the amino acid sequence set forth in SEQ ID NO:697, or a portion thereof, or an amino acid sequence that has at least 90%, 91%, 92%, 93%, 94%, 95%, 96%, 97%, 98%, or 99% sequence identity thereto. In some embodiments, the eZFP comprises the amino acid sequence set forth in SEQ ID NO:697. In some embodiments, the eZFP is encoded by the nucleotide sequence set forth in SEQ ID NO:893, or a nucleotide sequence that has at least 90%, 91%, 92%, 93%, 94%, 95%, 96%, 97%, 98%, or 99% sequence identity thereto. In some embodiments, the eZFP is encoded by the nucleotide sequence set forth in SEQ ID NO:893.

[0315] In some embodiments, provided herein is an eZFP (e.g., such as an eZFP comprised in a fusion protein of an epigenetic-modifying DNA-targeting system), such as eZFP_7 as described herein. In some embodiments, the eZFP targets a target site comprising the nucleotide sequence set forth in SEQ ID NO:1034, a contiguous portion thereof of at least 12 nt, or a complementary sequence of any of the foregoing. In some embodiments, the eZFP targets a target site comprising the nucleotide sequence set forth in SEQ ID NO:1034. In some embodiments, the eZFP comprises six zinc fingers denoted F1 through F6 in order from N-terminus to C-terminus, each comprising a corresponding zinc finger recognition region F1 through F6, and the amino acid sequence of each zinc finger recognition region is as follows: F1:QSGNLAR(SEQ ID NO:756) F2:ATCCLAH(SEQ ID NO:757) F3:RWQYLPT(SEQ ID NO:758) F4:DRSALAR(SEQ ID NO:759) F5:RSDNLSE(SEQ ID NO:760) F6:KRCNLRC(SEQ ID NO:761). In some embodiments, the eZFP comprises the amino acid sequence set forth in SEQ ID NO:698, or a portion thereof, or an amino acid sequence that has at least 90%, 91%, 92%, 93%, 94%, 95%, 96%, 97%, 98%, or 99% sequence identity thereto. In some embodiments, the eZFP comprises the amino acid sequence set forth in SEQ ID NO:698. In some embodiments, the eZFP is encoded by the nucleotide sequence set forth in SEQ ID NO:894, or a nucleotide sequence that has at least 90%, 91%, 92%, 93%, 94%, 95%, 96%, 97%, 98%, or 99% sequence identity thereto. In some embodiments, the eZFP is encoded by the nucleotide sequence set forth in SEQ ID NO:894.

[0316] In some embodiments, provided herein is an eZFP (e.g., such as an eZFP comprised in a fusion protein of an epigenetic-modifying DNA-targeting system), such as eZFP_8 as described herein. In some embodiments, the eZFP targets a target site comprising the nucleotide sequence set forth in SEQ ID NO:1035, a contiguous portion thereof of at least 12 nt, or a complementary sequence of any of the foregoing. In some embodiments, the eZFP targets a target site comprising the nucleotide sequence set forth in SEQ ID NO:1035. In some embodiments, the eZFP comprises six zinc fingers denoted F1 through F6 in order from N-terminus to C-terminus, each comprising a corresponding zinc finger recognition region F1 through F6, and the amino acid sequence of each zinc finger recognition region is as follows: F1:NPANLTR(SEQ ID NO:762) F2:QNATRTK(SEQ ID NO:763) F3:QSGHLAR(SEQ ID NO:764) F4:NRHDRAK(SEQ ID NO:765) F5:RSDHLSE(SEQ ID NO:766) F6:QRRSRYK(SEQ ID NO:767). In some embodiments, the eZFP comprises the amino acid sequence set forth in SEQ ID NO:699, or a portion thereof, or an amino acid sequence that has at least 90%, 91%, 92%, 93%, 94%, 95%, 96%, 97%, 98%, or 99% sequence identity thereto. In some embodiments, the eZFP comprises the amino acid sequence set forth in SEQ ID NO:699. In some embodiments, the eZFP is encoded by the nucleotide sequence set forth in SEQ ID NO:895, or a nucleotide sequence that has at least 90%, 91%, 92%, 93%, 94%, 95%, 96%, 97%, 98%, or 99% sequence identity thereto. In some embodiments, the eZFP is encoded by the nucleotide sequence set forth in SEQ ID NO:895.

[0317] In some embodiments, provided herein is an eZFP (e.g., such as an eZFP comprised in a fusion protein of an epigenetic-modifying DNA-targeting system), such as eZFP_9 as described herein. In some embodiments, the eZFP targets a target site comprising the nucleotide sequence set forth in SEQ ID NO:1036, a contiguous portion thereof of at least 12 nt, or a complementary sequence of any of the foregoing. In some embodiments, the eZFP targets a target site comprising the nucleotide sequence set forth in SEQ ID NO:1036. In some embodiments, the eZFP comprises six zinc fingers denoted F1 through F6 in order from N-terminus to C-terminus, each comprising a corresponding zinc finger recognition region F1 through F6, and the amino acid sequence of each zinc finger recognition region is as follows: F1:QSSDLSR(SEQ ID NO:768) F2:HRSTRNR(SEQ ID NO:769) F3:RSDVLSA(SEQ ID NO:770) F4:DSRTRKN(SEQ ID NO:771) F5:QSGSLTR(SEQ ID NO:772) F6:DQSGLAH(SEQ ID NO:773). In some embodiments, the eZFP comprises the amino acid sequence set forth in SEQ ID NO:700, or a portion thereof, or an amino acid sequence that has at least 90%, 91%, 92%, 93%, 94%, 95%, 96%, 97%, 98%, or 99% sequence identity thereto. In some embodiments, the eZFP comprises the amino acid sequence set forth in SEQ ID NO:700. In some embodiments, the eZFP is encoded by the nucleotide sequence set forth in SEQ ID NO:896, or a nucleotide sequence that has at least 90%, 91%, 92%, 93%, 94%, 95%, 96%, 97%, 98%, or 99% sequence identity thereto. In some embodiments, the eZFP is encoded by the nucleotide sequence set forth in SEQ ID NO:896.

[0318] In some embodiments, provided herein is an eZFP (e.g., such as an eZFP comprised in a fusion protein of an epigenetic-modifying DNA-targeting system), such as eZFP_10 as described herein. In some embodiments, the eZFP targets a target site comprising the nucleotide sequence set forth in SEQ ID NO:1037, a contiguous portion thereof of at least 12 nt, or a complementary sequence of any of the foregoing. In some embodiments, the eZFP targets a target site comprising the nucleotide sequence set forth in SEQ ID NO:1037. In some embodiments, the eZFP comprises six zinc fingers denoted F1 through F6 in order from N-terminus to C-terminus, each comprising a corresponding zinc finger recognition region F1 through F6, and the amino acid sequence of each zinc finger recognition region is as follows: F1:QNPAQWR(SEQ ID NO:774) F2:RSADLSR(SEQ ID NO:775) F3:TSGSLSR(SEQ ID NO:776) F4:RSDHLSR(SEQ ID NO:777) F5:RSDSLLR(SEQ ID NO:778) F6:QSYDRFQ(SEQ ID NO:779). In some embodiments, the eZFP comprises the amino acid sequence set forth in SEQ ID NO:701, or a portion thereof, or an amino acid sequence that has at least 90%, 91%, 92%, 93%, 94%, 95%, 96%, 97%, 98%, or 99% sequence identity thereto. In some embodiments, the eZFP comprises the amino acid sequence set forth in SEQ ID NO:701. In some embodiments, the eZFP is encoded by the nucleotide sequence set forth in SEQ ID NO:897, or a nucleotide sequence that has at least 90%, 91%, 92%, 93%, 94%, 95%, 96%, 97%, 98%, or 99% sequence identity thereto. In some embodiments, the eZFP is encoded by the nucleotide sequence set forth in SEQ ID NO:897.

[0319] In some embodiments, provided herein is an eZFP (e.g., such as an eZFP comprised in a fusion protein of an epigenetic-modifying DNA-targeting system), such as eZFP_11 as described herein. In some embodiments, the eZFP targets a target site comprising the nucleotide sequence set forth in SEQ ID NO:1038, a contiguous portion thereof of at least 12 nt, or a complementary sequence of any of the foregoing. In some embodiments, the eZFP targets a target site comprising the nucleotide sequence set forth in SEQ ID NO:1038. In some embodiments, the eZFP comprises six zinc fingers denoted F1 through F6 in order from N-terminus to C-terminus, each comprising a corresponding zinc finger recognition region F1 through F6, and the amino acid sequence of each zinc finger recognition region is as follows: F1:TSGSLSR(SEQ ID NO:780) F2:RSDHLSR(SEQ ID NO:781) F3:RSDSLLR(SEQ ID NO:782) F4:QSYDRFQ(SEQ ID NO:783) F5:RSDNLST(SEQ ID NO:784) F6:DNRDRIK(SEQ ID NO:785). In some embodiments, the eZFP comprises the amino acid sequence set forth in SEQ ID NO:702, or a portion thereof, or an amino acid sequence that has at least 90%, 91%, 92%, 93%, 94%, 95%, 96%, 97%, 98%, or 99% sequence identity thereto. In some embodiments, the eZFP comprises the amino acid sequence set forth in SEQ ID NO:702. In some embodiments, the eZFP is encoded by the nucleotide sequence set forth in SEQ ID NO:898, or a nucleotide sequence that has at least 90%, 91%, 92%, 93%, 94%, 95%, 96%, 97%, 98%, or 99% sequence identity thereto. In some embodiments, the eZFP is encoded by the nucleotide sequence set forth in SEQ ID NO:898.

[0320] In some embodiments, provided herein is an eZFP (e.g., such as an eZFP comprised in a fusion protein of an epigenetic-modifying DNA-targeting system), such as eZFP_12 as described herein. In some embodiments, the eZFP targets a target site comprising the nucleotide sequence set forth in SEQ ID NO:1039, a contiguous portion thereof of at least 12 nt, or a complementary sequence of any of the foregoing. In some embodiments, the eZFP targets a target site comprising the nucleotide sequence set forth in SEQ ID NO:1039. In some embodiments, the eZFP comprises six zinc fingers denoted F1 through F6 in order from N-terminus to C-terminus, each comprising a corresponding zinc finger recognition region F1 through F6, and the amino acid sequence of each zinc finger recognition region is as follows: F1:DRSNLSR(SEQ ID NO:786) F2:LRQNLIM(SEQ ID NO:787) F3:ERGTLAR(SEQ ID NO:788) F4:RSDALTQ(SEQ ID NO:789) F5:RSDSLSQ(SEQ ID NO:790) F6:RKADRTR(SEQ ID NO:791). In some embodiments, the eZFP comprises the amino acid sequence set forth in SEQ ID NO:703, or a portion thereof, or an amino acid sequence that has at least 90%, 91%, 92%, 93%, 94%, 95%, 96%, 97%, 98%, or 99% sequence identity thereto. In some embodiments, the eZFP comprises the amino acid sequence set forth in SEQ ID NO:703. In some embodiments, the eZFP is encoded by the nucleotide sequence set forth in SEQ ID NO:899, or a nucleotide sequence that has at least 90%, 91%, 92%, 93%, 94%, 95%, 96%, 97%, 98%, or 99% sequence identity thereto. In some embodiments, the eZFP is encoded by the nucleotide sequence set forth in SEQ ID NO:899.

[0321] In some embodiments, provided herein is an eZFP (e.g., such as an eZFP comprised in a fusion protein of an epigenetic-modifying DNA-targeting system), such as eZFP_13 as described herein. In some embodiments, the eZFP targets a target site comprising the nucleotide sequence set forth in SEQ ID NO:1040, a contiguous portion thereof of at least 12 nt, or a complementary sequence of any of the foregoing. In some embodiments, the eZFP targets a target site comprising the nucleotide sequence set forth in SEQ ID NO:1040. In some embodiments, the eZFP comprises six zinc fingers denoted F1 through F6 in order from N-terminus to C-terminus, each comprising a corresponding zinc finger recognition region F1 through F6, and the amino acid sequence of each zinc finger recognition region is as follows: F1:QYCCLTN(SEQ ID NO:792) F2:TSGNLTR(SEQ ID NO:793) F3:QSSDLSR(SEQ ID NO:794) F4:FRYYLKR(SEQ ID NO:795) F5:QSGDLTR(SEQ ID NO:796) F6:DKGNLTK(SEQ ID NO:797). In some embodiments, the eZFP comprises the amino acid sequence set forth in SEQ ID NO:704, or a portion thereof, or an amino acid sequence that has at least 90%, 91%, 92%, 93%, 94%, 95%, 96%, 97%, 98%, or 99% sequence identity thereto. In some embodiments, the eZFP comprises the amino acid sequence set forth in SEQ ID NO:704. In some embodiments, the eZFP is encoded by the nucleotide sequence set forth in SEQ ID NO:900, or a nucleotide sequence that has at least 90%, 91%, 92%, 93%, 94%, 95%, 96%, 97%, 98%, or 99% sequence identity thereto. In some embodiments, the eZFP is encoded by the nucleotide sequence set forth in SEQ ID NO:900.

[0322] In some embodiments, provided herein is an eZFP (e.g., such as an eZFP comprised in a fusion protein of an epigenetic-modifying DNA-targeting system), such as eZFP_14 as described herein. In some embodiments, the eZFP targets a target site comprising the nucleotide sequence set forth in SEQ ID NO:1041, a contiguous portion thereof of at least 12 nt, or a complementary sequence of any of the foregoing. In some embodiments, the eZFP targets a target site comprising the nucleotide sequence set forth in SEQ ID NO:1041. In some embodiments, the eZFP comprises six zinc fingers denoted F1 through F6 in order from N-terminus to C-terminus, each comprising a corresponding zinc finger recognition region F1 through F6, and the amino acid sequence of each zinc finger recognition region is as follows: F1:TSGSLSR(SEQ ID NO:798) F2:RSDNLTT(SEQ ID NO:799) F3:QSGNLAR(SEQ ID NO:800) F4:DRTTLMR(SEQ ID NO:801) F5:QSGHLAR(SEQ ID NO:802) F6:QLTHLNS(SEQ ID NO:803). In some embodiments, the eZFP comprises the amino acid sequence set forth in SEQ ID NO:705, or a portion thereof, or an amino acid sequence that has at least 90%, 91%, 92%, 93%, 94%, 95%, 96%, 97%, 98%, or 99% sequence identity thereto. In some embodiments, the eZFP comprises the amino acid sequence set forth in SEQ ID NO:705. In some embodiments, the eZFP is encoded by the nucleotide sequence set forth in SEQ ID NO:901, or a nucleotide sequence that has at least 90%, 91%, 92%, 93%, 94%, 95%, 96%, 97%, 98%, or 99% sequence identity thereto. In some embodiments, the eZFP is encoded by the nucleotide sequence set forth in SEQ ID NO:901.

[0323] In some embodiments, provided herein is an eZFP (e.g., such as an eZFP comprised in a fusion protein of an epigenetic-modifying DNA-targeting system), such as eZFP_15 as described herein. In some embodiments, the eZFP targets a target site comprising the nucleotide sequence set forth in SEQ ID NO:1042, a contiguous portion thereof of at least 12 nt, or a complementary sequence of any of the foregoing. In some embodiments, the eZFP targets a target site comprising the nucleotide sequence set forth in SEQ ID NO:1042. In some embodiments, the eZFP comprises six zinc fingers denoted F1 through F6 in order from N-terminus to C-terminus, each comprising a corresponding zinc finger recognition region F1 through F6, and the amino acid sequence of each zinc finger recognition region is as follows: F1:IKHDLHR(SEQ ID NO:804) F2:RSANLTR(SEQ ID NO:805) F3:RSDNLAR(SEQ ID NO:806) F4:QNVSRPR(SEQ ID NO:807) F5:RSDDLSK(SEQ ID NO:808) F6:DSSHRTR(SEQ ID NO:809). In some embodiments, the eZFP comprises the amino acid sequence set forth in SEQ ID NO:706, or a portion thereof, or an amino acid sequence that has at least 90%, 91%, 92%, 93%, 94%, 95%, 96%, 97%, 98%, or 99% sequence identity thereto. In some embodiments, the eZFP comprises the amino acid sequence set forth in SEQ ID NO:706. In some embodiments, the eZFP is encoded by the nucleotide sequence set forth in SEQ ID NO:902, or a nucleotide sequence that has at least 90%, 91%, 92%, 93%, 94%, 95%, 96%, 97%, 98%, or 99% sequence identity thereto. In some embodiments, the eZFP is encoded by the nucleotide sequence set forth in SEQ ID NO:902.

[0324] In some embodiments, provided herein is an eZFP (e.g., such as an eZFP comprised in a fusion protein of an epigenetic-modifying DNA-targeting system), such as eZFP_16 as described herein. In some embodiments, the eZFP targets a target site comprising the nucleotide sequence set forth in SEQ ID NO:1043, a contiguous portion thereof of at least 12 nt, or a complementary sequence of any of the foregoing. In some embodiments, the eZFP targets a target site comprising the nucleotide sequence set forth in SEQ ID NO:1043. In some embodiments, the eZFP comprises six zinc fingers denoted F1 through F6 in order from N-terminus to C-terminus, each comprising a corresponding zinc finger recognition region F1 through F6, and the amino acid sequence of each zinc finger recognition region is as follows: F1:RSDNLAR(SEQ ID NO:810) F2:QNVSRPR(SEQ ID NO:811) F3:RSDDLSK(SEQ ID NO:812) F4:DSSHRTR(SEQ ID NO:813) F5:TSSNRKT(SEQ ID NO:814) F6:AQWTRAC(SEQ ID NO:815). In some embodiments, the eZFP comprises the amino acid sequence set forth in SEQ ID NO:707, or a portion thereof, or an amino acid sequence that has at least 90%, 91%, 92%, 93%, 94%, 95%, 96%, 97%, 98%, or 99% sequence identity thereto. In some embodiments, the eZFP comprises the amino acid sequence set forth in SEQ ID NO:707. In some embodiments, the eZFP is encoded by the nucleotide sequence set forth in SEQ ID NO:903, or a nucleotide sequence that has at least 90%, 91%, 92%, 93%, 94%, 95%, 96%, 97%, 98%, or 99% sequence identity thereto. In some embodiments, the eZFP is encoded by the nucleotide sequence set forth in SEQ ID NO:903.

[0325] In some embodiments, provided herein is an eZFP (e.g., such as an eZFP comprised in a fusion protein of an epigenetic-modifying DNA-targeting system), such as eZFP_17 as described herein. In some embodiments, the eZFP targets a target site comprising the nucleotide sequence set forth in SEQ ID NO:1044, a contiguous portion thereof of at least 12 nt, or a complementary sequence of any of the foregoing. In some embodiments, the eZFP targets a target site comprising the nucleotide sequence set forth in SEQ ID NO:1044. In some embodiments, the eZFP comprises six zinc fingers denoted F1 through F6 in order from N-terminus to C-terminus, each comprising a corresponding zinc finger recognition region F1 through F6, and the amino acid sequence of each zinc finger recognition region is as follows: F1:RSDDLSK(SEQ ID NO:816) F2:DSSHRTR(SEQ ID NO:817) F3:TSSNRKT(SEQ ID NO:818) F4:AQWTRAC(SEQ ID NO:819) F5:RKQTRTT(SEQ ID NO:820) F6:HRSSLRR(SEQ ID NO:821). In some embodiments, the eZFP comprises the amino acid sequence set forth in SEQ ID NO:708, or a portion thereof, or an amino acid sequence that has at least 90%, 91%, 92%, 93%, 94%, 95%, 96%, 97%, 98%, or 99% sequence identity thereto. In some embodiments, the eZFP comprises the amino acid sequence set forth in SEQ ID NO:708. In some embodiments, the eZFP is encoded by the nucleotide sequence set forth in SEQ ID NO:904, or a nucleotide sequence that has at least 90%, 91%, 92%, 93%, 94%, 95%, 96%, 97%, 98%, or 99% sequence identity thereto. In some embodiments, the eZFP is encoded by the nucleotide sequence set forth in SEQ ID NO:904.

[0326] In some embodiments, provided herein is an eZFP (e.g., such as an eZFP comprised in a fusion protein of an epigenetic-modifying DNA-targeting system), such as eZFP_18 as described herein. In some embodiments, the eZFP targets a target site comprising the nucleotide sequence set forth in SEQ ID NO:1045, a contiguous portion thereof of at least 12 nt, or a complementary sequence of any of the foregoing. In some embodiments, the eZFP targets a target site comprising the nucleotide sequence set forth in SEQ ID NO:1045. In some embodiments, the eZFP comprises six zinc fingers denoted F1 through F6 in order from N-terminus to C-terminus, each comprising a corresponding zinc finger recognition region F1 through F6, and the amino acid sequence of each zinc finger recognition region is as follows: F1:QSAHRKN(SEQ ID NO:822) F2:TSSNRKT(SEQ ID NO:823) F3:RSDNLSA(SEQ ID NO:824) F4:RNNDRKT(SEQ ID NO:825) F5:TSGSLSR(SEQ ID NO:826) F6:QAGHLAK(SEQ ID NO:827). In some embodiments, the eZFP comprises the amino acid sequence set forth in SEQ ID NO:709, or a portion thereof, or an amino acid sequence that has at least 90%, 91%, 92%, 93%, 94%, 95%, 96%, 97%, 98%, or 99% sequence identity thereto. In some embodiments, the eZFP comprises the amino acid sequence set forth in SEQ ID NO:709. In some embodiments, the eZFP is encoded by the nucleotide sequence set forth in SEQ ID NO:905, or a nucleotide sequence that has at least 90%, 91%, 92%, 93%, 94%, 95%, 96%, 97%, 98%, or 99% sequence identity thereto. In some embodiments, the eZFP is encoded by the nucleotide sequence set forth in SEQ ID NO:905.

[0327] In some embodiments, provided herein is an eZFP (e.g., such as an eZFP comprised in a fusion protein of an epigenetic-modifying DNA-targeting system), such as eZFP_19 as described herein. In some embodiments, the eZFP targets a target site comprising the nucleotide sequence set forth in SEQ ID NO:1046, a contiguous portion thereof of at least 12 nt, or a complementary sequence of any of the foregoing. In some embodiments, the eZFP targets a target site comprising the nucleotide sequence set forth in SEQ ID NO:1046. In some embodiments, the eZFP comprises six zinc fingers denoted F1 through F6 in order from N-terminus to C-terminus, each comprising a corresponding zinc finger recognition region F1 through F6, and the amino acid sequence of each zinc finger recognition region is as follows: F1:RSDHLSQ(SEQ ID NO:828) F2:ASSTRTK(SEQ ID NO:829) F3:RSDDLTR(SEQ ID NO:830) F4:QKSNLSS(SEQ ID NO:831) F5:QSANRTT(SEQ ID NO:832) F6:QNATRTK(SEQ ID NO:833). In some embodiments, the eZFP comprises the amino acid sequence set forth in SEQ ID NO:710, or a portion thereof, or an amino acid sequence that has at least 90%, 91%, 92%, 93%, 94%, 95%, 96%, 97%, 98%, or 99% sequence identity thereto. In some embodiments, the eZFP comprises the amino acid sequence set forth in SEQ ID NO:710. In some embodiments, the eZFP is encoded by the nucleotide sequence set forth in SEQ ID NO:906, or a nucleotide sequence that has at least 90%, 91%, 92%, 93%, 94%, 95%, 96%, 97%, 98%, or 99% sequence identity thereto. In some embodiments, the eZFP is encoded by the nucleotide sequence set forth in SEQ ID NO:906.

[0328] In some embodiments, provided herein is an eZFP (e.g., such as an eZFP comprised in a fusion protein of an epigenetic-modifying DNA-targeting system), such as eZFP_20 as described herein. In some embodiments, the eZFP targets a target site comprising the nucleotide sequence set forth in SEQ ID NO:1047, a contiguous portion thereof of at least 12 nt, or a complementary sequence of any of the foregoing. In some embodiments, the eZFP targets a target site comprising the nucleotide sequence set forth in SEQ ID NO:1047. In some embodiments, the eZFP comprises six zinc fingers denoted F1 through F6 in order from N-terminus to C-terminus, each comprising a corresponding zinc finger recognition region F1 through F6, and the amino acid sequence of each zinc finger recognition region is as follows: F1:RSDTLSE(SEQ ID NO:834) F2:RRWTLVG(SEQ ID NO:835) F3:DRSNLSR(SEQ ID NO:836) F4:QSGDLTR(SEQ ID NO:837) F5:QSSDLSR(SEQ ID NO:838) F6:YHWYLKK(SEQ ID NO:839). In some embodiments, the eZFP comprises the amino acid sequence set forth in SEQ ID NO:711, or a portion thereof, or an amino acid sequence that has at least 90%, 91%, 92%, 93%, 94%, 95%, 96%, 97%, 98%, or 99% sequence identity thereto. In some embodiments, the eZFP comprises the amino acid sequence set forth in SEQ ID NO:711. In some embodiments, the eZFP is encoded by the nucleotide sequence set forth in SEQ ID NO:907, or a nucleotide sequence that has at least 90%, 91%, 92%, 93%, 94%, 95%, 96%, 97%, 98%, or 99% sequence identity thereto. In some embodiments, the eZFP is encoded by the nucleotide sequence set forth in SEQ ID NO:907.

[0329] In some embodiments, provided herein is an eZFP (e.g., such as an eZFP comprised in a fusion protein of an epigenetic-modifying DNA-targeting system), such as eZFP_21 as described herein. In some embodiments, the eZFP targets a target site comprising the nucleotide sequence set forth in SEQ ID NO:1048, a contiguous portion thereof of at least 12 nt, or a complementary sequence of any of the foregoing. In some embodiments, the eZFP targets a target site comprising the nucleotide sequence set forth in SEQ ID NO:1048. In some embodiments, the eZFP comprises six zinc fingers denoted F1 through F6 in order from N-terminus to C-terminus, each comprising a corresponding zinc finger recognition region F1 through F6, and the amino acid sequence of each zinc finger recognition region is as follows: F1:RSANLAR(SEQ ID NO:840) F2:RSDNLRE(SEQ ID NO:841) F3:RPYTLRL(SEQ ID NO:842) F4:HRSNLNK(SEQ ID NO:843) F5:QSGSLTR(SEQ ID NO:844) F6:TSANLSR(SEQ ID NO:845). In some embodiments, the eZFP comprises the amino acid sequence set forth in SEQ ID NO:712, or a portion thereof, or an amino acid sequence that has at least 90%, 91%, 92%, 93%, 94%, 95%, 96%, 97%, 98%, or 99% sequence identity thereto. In some embodiments, the eZFP comprises the amino acid sequence set forth in SEQ ID NO:712. In some embodiments, the eZFP is encoded by the nucleotide sequence set forth in SEQ ID NO:908, or a nucleotide sequence that has at least 90%, 91%, 92%, 93%, 94%, 95%, 96%, 97%, 98%, or 99% sequence identity thereto. In some embodiments, the eZFP is encoded by the nucleotide sequence set forth in SEQ ID NO:908.

[0330] In some embodiments, provided herein is an eZFP (e.g., such as an eZFP comprised in a fusion protein of an epigenetic-modifying DNA-targeting system), such as eZFP_22 as described herein. In some embodiments, the eZFP targets a target site comprising the nucleotide sequence set forth in SEQ ID NO:1049, a contiguous portion thereof of at least 12 nt, or a complementary sequence of any of the foregoing. In some embodiments, the eZFP targets a target site comprising the nucleotide sequence set forth in SEQ ID NO:1049. In some embodiments, the eZFP comprises six zinc fingers denoted F1 through F6 in order from N-terminus to C-terminus, each comprising a corresponding zinc finger recognition region F1 through F6, and the amino acid sequence of each zinc finger recognition region is as follows: F1:RSDDLVR(SEQ ID NO:846) F2:TSGSLVR(SEQ ID NO:847) F3:RSDKLVR(SEQ ID NO:848) F4:RSDELVR(SEQ ID NO:849) F5:TSHSLTE(SEQ ID NO:850) F6:RADNLTE(SEQ ID NO:851). In some embodiments, the eZFP comprises the amino acid sequence set forth in SEQ ID NO:713, or a portion thereof, or an amino acid sequence that has at least 90%, 91%, 92%, 93%, 94%, 95%, 96%, 97%, 98%, or 99% sequence identity thereto. In some embodiments, the eZFP comprises the amino acid sequence set forth in SEQ ID NO:713. In some embodiments, the eZFP is encoded by the nucleotide sequence set forth in SEQ ID NO:909, or a nucleotide sequence that has at least 90%, 91%, 92%, 93%, 94%, 95%, 96%, 97%, 98%, or 99% sequence identity thereto. In some embodiments, the eZFP is encoded by the nucleotide sequence set forth in SEQ ID NO:909.

[0331] In some embodiments, provided herein is an eZFP (e.g., such as an eZFP comprised in a fusion protein of an epigenetic-modifying DNA-targeting system), such as eZFP_23 as described herein. In some embodiments, the eZFP targets a target site comprising the nucleotide sequence set forth in SEQ ID NO:1050, a contiguous portion thereof of at least 12 nt, or a complementary sequence of any of the foregoing. In some embodiments, the eZFP targets a target site comprising the nucleotide sequence set forth in SEQ ID NO:1050. In some embodiments, the eZFP comprises six zinc fingers denoted F1 through F6 in order from N-terminus to C-terminus, each comprising a corresponding zinc finger recognition region F1 through F6, and the amino acid sequence of each zinc finger recognition region is as follows: F1:ERSHLRE(SEQ ID NO:852) F2:TSHSLTE(SEQ ID NO:853) F3:QAGHLAS(SEQ ID NO:854) F4:TSHSLTE(SEQ ID NO:855) F5:DPGHLVR(SEQ ID NO:856) F6:TSGNLVR(SEQ ID NO:857). In some embodiments, the eZFP comprises the amino acid sequence set forth in SEQ ID NO:714, or a portion thereof, or an amino acid sequence that has at least 90%, 91%, 92%, 93%, 94%, 95%, 96%, 97%, 98%, or 99% sequence identity thereto. In some embodiments, the eZFP comprises the amino acid sequence set forth in SEQ ID NO:714. In some embodiments, the eZFP is encoded by the nucleotide sequence set forth in SEQ ID NO:910, or a nucleotide sequence that has at least 90%, 91%, 92%, 93%, 94%, 95%, 96%, 97%, 98%, or 99% sequence identity thereto. In some embodiments, the eZFP is encoded by the nucleotide sequence set forth in SEQ ID NO:910.

[0332] In some embodiments, provided herein is an eZFP (e.g., such as an eZFP comprised in a fusion protein of an epigenetic-modifying DNA-targeting system), such as eZFP_24 as described herein. In some embodiments, the eZFP targets a target site comprising the nucleotide sequence set forth in SEQ ID NO:1051, a contiguous portion thereof of at least 12 nt, or a complementary sequence of any of the foregoing. In some embodiments, the eZFP targets a target site comprising the nucleotide sequence set forth in SEQ ID NO:1051. In some embodiments, the eZFP comprises six zinc fingers denoted F1 through F6 in order from N-terminus to C-terminus, each comprising a corresponding zinc finger recognition region F1 through F6, and the amino acid sequence of each zinc finger recognition region is as follows: F1:RADNLTE(SEQ ID NO:858) F2:TSGSLVR(SEQ ID NO:859) F3:RKDNLKN(SEQ ID NO:860) F4:QSSSLVR(SEQ ID NO:861) F5:RSDKLVR(SEQ ID NO:862) F6:DSGNLRV(SEQ ID NO:863). In some embodiments, the eZFP comprises the amino acid sequence set forth in SEQ ID NO:715, or a portion thereof, or an amino acid sequence that has at least 90%, 91%, 92%, 93%, 94%, 95%, 96%, 97%, 98%, or 99% sequence identity thereto. In some embodiments, the eZFP comprises the amino acid sequence set forth in SEQ ID NO:715. In some embodiments, the eZFP is encoded by the nucleotide sequence set forth in SEQ ID NO:911, or a nucleotide sequence that has at least 90%, 91%, 92%, 93%, 94%, 95%, 96%, 97%, 98%, or 99% sequence identity thereto. In some embodiments, the eZFP is encoded by the nucleotide sequence set forth in SEQ ID NO:911.

[0333] In some embodiments, provided herein is an eZFP (e.g., such as an eZFP comprised in a fusion protein of an epigenetic-modifying DNA-targeting system), such as eZFP_25 as described herein. In some embodiments, the eZFP targets a target site comprising the nucleotide sequence set forth in SEQ ID NO:1052, a contiguous portion thereof of at least 12 nt, or a complementary sequence of any of the foregoing. In some embodiments, the eZFP targets a target site comprising the nucleotide sequence set forth in SEQ ID NO:1052. In some embodiments, the eZFP comprises six zinc fingers denoted F1 through F6 in order from N-terminus to C-terminus, each comprising a corresponding zinc finger recognition region F1 through F6, and the amino acid sequence of each zinc finger recognition region is as follows: F1:QSSSLVR(SEQ ID NO:864) F2:QSGDLRR(SEQ ID NO:865) F3:RSDERKR(SEQ ID NO:866) F4:HRTTLTN(SEQ ID NO:867) F5:RSDHLTN(SEQ ID NO:868) F6:TSGELVR(SEQ ID NO:869). In some embodiments, the eZFP comprises the amino acid sequence set forth in SEQ ID NO:716, or a portion thereof, or an amino acid sequence that has at least 90%, 91%, 92%, 93%, 94%, 95%, 96%, 97%, 98%, or 99% sequence identity thereto. In some embodiments, the eZFP comprises the amino acid sequence set forth in SEQ ID NO:716. In some embodiments, the eZFP is encoded by the nucleotide sequence set forth in SEQ ID NO:912, or a nucleotide sequence that has at least 90%, 91%, 92%, 93%, 94%, 95%, 96%, 97%, 98%, or 99% sequence identity thereto. In some embodiments, the eZFP is encoded by the nucleotide sequence set forth in SEQ ID NO:912.

[0334] In some embodiments, provided herein is an eZFP (e.g., such as an eZFP comprised in a fusion protein of an epigenetic-modifying DNA-targeting system), such as eZFP_26 as described herein. In some embodiments, the eZFP targets a target site comprising the nucleotide sequence set forth in SEQ ID NO:1053, a contiguous portion thereof of at least 12 nt, or a complementary sequence of any of the foregoing. In some embodiments, the eZFP targets a target site comprising the nucleotide sequence set forth in SEQ ID NO:1053. In some embodiments, the eZFP comprises six zinc fingers denoted F1 through F6 in order from N-terminus to C-terminus, each comprising a corresponding zinc finger recognition region F1 through F6, and the amino acid sequence of each zinc finger recognition region is as follows: F1:QSGDLRR(SEQ ID NO:870) F2:RSDERKR(SEQ ID NO:871) F3:HRTTLTN(SEQ ID NO:872) F4:RSDHLTN(SEQ ID NO:873) F5:TSGELVR(SEQ ID NO:874) F6:RSDDLVR(SEQ ID NO:875). In some embodiments, the eZFP comprises the amino acid sequence set forth in SEQ ID NO:717, or a portion thereof, or an amino acid sequence that has at least 90%, 91%, 92%, 93%, 94%, 95%, 96%, 97%, 98%, or 99% sequence identity thereto. In some embodiments, the eZFP comprises the amino acid sequence set forth in SEQ ID NO:717. In some embodiments, the eZFP is encoded by the nucleotide sequence set forth in SEQ ID NO:913, or a nucleotide sequence that has at least 90%, 91%, 92%, 93%, 94%, 95%, 96%, 97%, 98%, or 99% sequence identity thereto. In some embodiments, the eZFP is encoded by the nucleotide sequence set forth in SEQ ID NO:913.

[0335] In some embodiments, provided herein is an eZFP (e.g., such as an eZFP comprised in a fusion protein of an epigenetic-modifying DNA-targeting system), such as eZFP_27 as described herein. In some embodiments, the eZFP targets a target site comprising the nucleotide sequence set forth in SEQ ID NO:1054, a contiguous portion thereof of at least 12 nt, or a complementary sequence of any of the foregoing. In some embodiments, the eZFP targets a target site comprising the nucleotide sequence set forth in SEQ ID NO:1054. In some embodiments, the eZFP comprises six zinc fingers denoted F1 through F6 in order from N-terminus to C-terminus, each comprising a corresponding zinc finger recognition region F1 through F6, and the amino acid sequence of each zinc finger recognition region is as follows: F1:QRAHLER(SEQ ID NO:876) F2:QLAHLRA(SEQ ID NO:877) F3:DPGHLVR(SEQ ID NO:878) F4:RRSACRR(SEQ ID NO:879) F5:RSDHLTT(SEQ ID NO:880) F6:QSSSLVR(SEQ ID NO:881). In some embodiments, the eZFP comprises the amino acid sequence set forth in SEQ ID NO:718, or a portion thereof, or an amino acid sequence that has at least 90%, 91%, 92%, 93%, 94%, 95%, 96%, 97%, 98%, or 99% sequence identity thereto. In some embodiments, the eZFP comprises the amino acid sequence set forth in SEQ ID NO:718. In some embodiments, the eZFP is encoded by the nucleotide sequence set forth in SEQ ID NO:914, or a nucleotide sequence that has at least 90%, 91%, 92%, 93%, 94%, 95%, 96%, 97%, 98%, or 99% sequence identity thereto. In some embodiments, the eZFP is encoded by the nucleotide sequence set forth in SEQ ID NO:914.

[0336] In some embodiments, provided herein is an eZFP (e.g., such as an eZFP comprised in a fusion protein of an epigenetic-modifying DNA-targeting system), such as eZFP_28 as described herein. In some embodiments, the eZFP targets a target site comprising the nucleotide sequence set forth in SEQ ID NO:1055, a contiguous portion thereof of at least 12 nt, or a complementary sequence of any of the foregoing. In some embodiments, the eZFP targets a target site comprising the nucleotide sequence set forth in SEQ ID NO:1055. In some embodiments, the eZFP comprises six zinc fingers denoted F1 through F6 in order from N-terminus to C-terminus, each comprising a corresponding zinc finger recognition region F1 through F6, and the amino acid sequence of each zinc finger recognition region is as follows: F1:QSSNLVR(SEQ ID NO:882) F2:RSDDLVR(SEQ ID NO:883) F3:THLDLIR(SEQ ID NO:884) F4:TSGNLTE(SEQ ID NO:885) F5:RRSACRR(SEQ ID NO:886) F6:RNDTLTE(SEQ ID NO:887). In some embodiments, the eZFP comprises the amino acid sequence set forth in SEQ ID NO:719, or a portion thereof, or an amino acid sequence that has at least 90%, 91%, 92%, 93%, 94%, 95%, 96%, 97%, 98%, or 99% sequence identity thereto. In some embodiments, the eZFP comprises the amino acid sequence set forth in SEQ ID NO:719. In some embodiments, the eZFP is encoded by the nucleotide sequence set forth in SEQ ID NO:915, or a nucleotide sequence that has at least 90%, 91%, 92%, 93%, 94%, 95%, 96%, 97%, 98%, or 99% sequence identity thereto. In some embodiments, the eZFP is encoded by the nucleotide sequence set forth in SEQ ID NO:915.

[0337] D. Other DNA-Binding Domains

[0338] In some of any of the provided embodiments, the DNA-binding domain comprises a transcription activator-like effector (TALE); a meganuclease; a homing endonuclease; or an I-SceI enzyme or a variant thereof. In some embodiments, the DNA-binding domain comprises a catalytically inactive variant of any of the foregoing.

[0339] Transcription activator-like effectors (TALEs), are proteins naturally found in Xanthomonas bacteria. TALEs comprise a plurality of repeated amino acid sequences, each repeat having binding specificity for one base in a target sequence. Each repeat comprises a pair of variable residues in position 12 and 13 (repeat variable diresidue; RVD) that determine the nucleotide specificity of the repeat. In some embodiments, RVDs associated with recognition of the different nucleotides are HD for recognizing C, NG for recognizing T, NI for recognizing A, NN for recognizing G or A, NS for recognizing A, C, G or T, HG for recognizing T, IG for recognizing T, NK for recognizing G, HA for recognizing C, ND for recognizing C, HI for recognizing C, HN for recognizing G, NA for recognizing G, SN for recognizing G or A and YG for recognizing T, TL for recognizing A, VT for recognizing A or G and SW for recognizing A. In some embodiments, RVDs can be mutated towards other amino acid residues in order to modulate their specificity towards nucleotides A, T, C and G and in particular to enhance this specificity. Binding domains with similar modular base-per-base nucleic acid binding properties can also be derived from different bacterial species. These alternative modular proteins may exhibit more sequence variability than TALE repeats.

[0340] In some embodiments, a “TALE DNA binding domain” or “TALE” is a polypeptide comprising one or more TALE repeat domains/units. The repeat domains, each comprising a repeat variable diresidue (RVD), are involved in binding of the TALE to its cognate target DNA sequence. A single “repeat unit” (also referred to as a “repeat”) is typically 33-35 amino acids in length and exhibits at least some sequence homology with other TALE repeat sequences within a naturally occurring TALE protein. TALE proteins may be designed to bind to a target site using canonical or non-canonical RVDs within the repeat units. See, e.g., U.S. Pat. Nos. 8,586,526 and 9,458,205.

[0341] In some embodiments, a TALE is a fusion protein comprising a nucleic acid binding domain derived from a TALE and an effector domain. In some embodiments, one or more sites in the FXN locus can be targeted by engineered TALEs.

[0342] Zinc finger and TALE DNA-binding domains can be engineered to bind to a predetermined nucleotide sequence, for example via engineering (altering one or more amino acids) of the recognition helix region of a naturally occurring zinc finger protein, by engineering of the amino acids in a TALE repeat involved in DNA binding (the repeat variable diresidue or RVD region), or by systematic ordering of modular DNA-binding domains, such as TALE repeats or ZFP domains. Therefore, engineered zinc finger proteins or TALE proteins are proteins that are non-naturally occurring. Non-limiting examples of methods for engineering zinc finger proteins and TALEs are design and selection. A designed protein is a protein not occurring in nature whose design/composition results principally from rational criteria. Rational criteria for design include application of substitution rules and computerized algorithms for processing information in a database storing information of existing ZFP or TALE designs (canonical and non-canonical RVDs) and binding data. See, for example, U.S. Pat. Nos. 9,458,205; 8,586,526; 6,140,081; 6,453,242; and 6,534,261; see also WO 98/53058; WO 98/53059; WO 98/53060; WO 02/016536 and WO 03/016496.

[0343] E. Effector Domains

[0344] In some aspects, the DNA-targeting systems provided herein include one or more effector domains. In some embodiments, provided herein is a DNA-targeting system comprising a fusion protein comprising: (a) a DNA-binding domain for targeting to a target site in a Hepatitis B viral DNA sequence, such as a gene or regulatory element thereof, for example any described above, and (b) at least one effector domain. In some aspects, the effector domain is capable of reducing transcription of the gene, i.e. comprises a transcriptional repressor effector domain. In some aspects, the effector domain comprises a transcription repressor effector domain.

[0345] In some aspects, the effector domain, represses, induces, catalyzes, or leads to reduced transcription of a gene and/or regulatory element thereof when ectopically recruited to the gene or DNA regulatory element thereof.

[0346] In some embodiments, the effector domain induces, catalyzes or leads to transcription repression, transcription co-repression, transcription repression, transcription factor release, polymerization, histone modification, histone acetylation, histone deacetylation, nucleosome remodeling, chromatin remodeling, heterochromatin formation, proteolysis, ubiquitination, deubiquitination, phosphorylation, dephosphorylation, splicing, nucleic acid association, DNA methylation, DNA demethylation, histone methylation, histone demethylation, or DNA base oxidation. In some embodiments, the effector domain represses, induces, catalyzes or leads to transcription repression or transcription co-repression. In some embodiments, the effector domain induces transcription repression. In some embodiments, the effector domain has one of the aforementioned activities itself (i.e. acts directly). In some embodiments, the effector domain recruits and/or interacts with a polypeptide domain that has one of the aforementioned activities (i.e. acts indirectly).

[0347] Gene expression of endogenous mammalian genes, such as human genes, can be achieved by targeting a fusion protein comprising a DNA-binding domain, such as a dCas9, and an effector domain to mammalian genes or regulatory DNA elements thereof (e.g. a promoter or enhancer) via one or more gRNAs. Any of a variety of effector domains are known and can be used in accord with the provided embodiments. Repression of target genes and/or regulatory element thereof by such effector domains as Cas fusion proteins with a variety of Cas molecules and the transcriptional repressor domains, are described, for example, in WO2021226077, WO2017180915, WO2014197748, WO2014093655, US20190127713, WO2013176772, Adli, M. Nat. Commun. 9, 1911 (2018), Urrutia, R. Genome Biol. 4, 231 (2003), Groner, A. C. et al. PLoS Genet. 6, e1000869 (2010), Liu, X. S. et al. Cell 167, 233-247.e17 (2016), and Lei, Y. et al. Nat. Commun. 8, 16026 (2017).

[0348] In some embodiments, the effector domain may comprise a KRAB domain, ERF repressor domain, MXI1 domain, SID4X domain, MAD-SID domain, a DNMT family protein domain (e.g. DNMT3A or DNMT3B), a fusion of one or more DNMT family proteins or domains thereof (e.g. DNMT3A/L, which comprises a fusion of DNMT3A and DNMT3L domains), EZH2 domain, LSD1, a SunTag domain, a partially or fully functional fragment or domain of any of the foregoing, or a combination of any of the foregoing. In some embodiments, the fusion protein may be dCas9-KRAB. In some embodiments, the fusion protein may be DNMT3A/L-dCas9-KRAB. In some embodiments, the fusion protein may be KRAB-dCas9-DNMT3A/L.

[0349] In some embodiments, the effector domain comprises a transcriptional repressor domain described in WO 2021/226077.

[0350] In some embodiments, the effector domain comprises a KRAB domain, or a variant thereof. The KRAB-containing zinc finger proteins make up the largest family of transcriptional repressors in mammals. The Krüppel associated box (KRAB) domain is a transcriptional repressor domain present in many zinc finger protein-based transcription factors. The KRAB domain comprises charged amino acids and can be divided into sub-domains A and B. The KRAB domain recruits corepressors KAP1 (KRAB-associated protein-1), epigenetic readers such as heterochromatin protein 1 (HP1), and other chromatin modulators to induce transcriptional repression through heterochromatin formation. KRAB-mediated gene repression is associated with loss of histone H3-acetylation and an increase in H3 lysine 9 trimethylation (H3K9me3) at the repressed gene promoters. KRAB domains, including in dCas fusion proteins, have been described, for example, in WO 2017/180915, WO 2014/197748, US 2019/0127713, WO 2013/176772, Urrutia R. et al. Genome Biol. 4, 231 (2003), Groner A. C. et al. PLoS Genet. 6, e1000869 (2010). In some embodiments, the effector domain comprises at least one KRAB domain or a variant thereof.

[0351] In some embodiments, the KRAB domain is set forth in SEQ ID NO: 590. In some embodiments, the effector domain comprises the sequence set forth in SEQ ID NO: 590, or a portion thereof, or an amino acid sequence that has at least 90%, 91%, 92%, 93%, 94%, 95%, 96%, 97%, 98%, or 99% sequence identity to any of the foregoing.

[0352] In some embodiments, the KRAB domain is set forth in SEQ ID NO: 669. In some embodiments, the effector domain comprises the sequence set forth in SEQ ID NO: 669, or a portion thereof, or an amino acid sequence that has at least 90%, 91%, 92%, 93%, 94%, 95%, 96%, 97%, 98%, or 99% sequence identity to any of the foregoing.

[0353] In some embodiments, the effector domain comprises at least one ERF repressor domain, or a variant thereof. ERF (ETS2 repressor factor) is a strong transcriptional repressor that comprises a conserved ets-DNA-binding domain, and represses transcription via a distinct domain at the carboxyl-terminus of the protein. ERF repressor domains, including in dCas fusion proteins, have been described, for example, in WO2017180915, WO2014197748, WO2013176772, Mavrothalassitis, G., Ghysdael, J. Proteins of the ETS family with transcriptional repressor activity. Oncogene 19, 6524-6532 (2000). In some embodiments, the effector domain comprises at least one ERF repressor domain or a variant thereof. An exemplary ERF repressor domain is set forth in SEQ ID NO:600. In some embodiments, the effector domain comprises the sequence set forth in SEQ ID NO: 600, or a portion thereof, or an amino acid sequence that has at least 90%, 91%, 92%, 93%, 94%, 95%, 96%, 97%, 98%, or 99% sequence identity to any of the foregoing.

[0354] In some embodiments, the effector domain comprises at least one MXI1 domain, or a variant thereof. The MXI1 domain functions by antagonizing the myc transcriptional activity by competing for binding to myc-associated factor x (MAX). MXI1 domains, including in dCas fusion proteins, have been described, for example, in WO2017180915, WO2014197748, US20190127713. In some embodiments, the effector domain comprises at least one MXI1 domain or a variant thereof. An exemplary MXI1 domain is set forth in SEQ ID NO: 601. In some embodiments, the effector domain comprises the sequence set forth in SEQ ID NO: 601, or a portion thereof, or an amino acid sequence that has at least 90%, 91%, 92%, 93%, 94%, 95%, 96%, 97%, 98%, or 99% sequence identity to any of the foregoing.

[0355] In some embodiments, the effector domain comprises at least one SID4X domain, or a variant thereof. The mSin3 interacting domain (SID) is present on different transcription repressor proteins. It interacts with the paired amphipathic alpha-helix 2 (PAH2) domain of mSin3, a transcriptional repressor domain that is attached to transcription repressor proteins such as the mSin3 A corepressor. A dCas9 molecule can be fused to four concatenated mSin3 interaction domains (SID4X). SID domains, including in dCas fusion proteins, have been described, for example, in WO2017180915, WO2014197748, WO2014093655. In some embodiments, the effector domain comprises at least one SID domain or a variant thereof. An exemplary SID domain is set forth in SEQ ID NO:602. In some embodiments, the effector domain comprises the sequence set forth in SEQ ID NO: 602, or a portion thereof, or an amino acid sequence that has at least 90%, 91%, 92%, 93%, 94%, 95%, 96%, 97%, 98%, or 99% sequence identity to any of the foregoing.

[0356] In some embodiments, the effector domain comprises at least one MAD domain, or a variant thereof. The MAD family proteins, Mad1, Mxi1, Mad3, and Mad4, belong to the basic helix-loop-helix-zipper class and contain a conserved N terminal region (termed Sin3 interaction domain (SID)) necessary for repressional activity. MAD-SID domains, including in dCas fusion proteins, have been described, for example, in WO2017180915, WO2014197748, WO2013176772. In some embodiments, the effector domain comprises at least one MAD-SID domain or a variant thereof. An exemplary MAD-SID domain is set forth in SEQ ID NO:603. In some embodiments, the effector domain comprises the sequence set forth in SEQ ID NO:603, or a portion thereof, or an amino acid sequence that has at least 90%, 91%, 92%, 93%, 94%, 95%, 96%, 97%, 98%, or 99% sequence identity to any of the foregoing.

[0357] In some embodiments, the effector domain is from a DNMT3 or is a portion or a functionally active variant thereof with DNA methyltransferase activity. The DNMT3A and DNMT3B are two DNA methyltransferases that catalyze de novo methylation, which depending on the site may be associated with transcriptional repression. DNMTs, such as DNMT3s, mediate transfer of a methyl group from the universal methyl donor, S-adenosyl-L-methionine (SAM), to the 5-position of cytosine residues. In some aspects, these DNMT3 DNA methyltransferases induce de novo methylation of a cytosine base to methylated 5-methylcytosine. DNMT3, including in dCas fusion proteins, have been described, for example, in US20190127713, Liu, X. S. et al. Cell 167, 233-247.e17 (2016), Lei, Y. et al. Nat. Commun. 8, 16026 (2017). DNMT3 proteins, such as DNMT3A and DNMT3B, contain an N-terminal part that is naturally involved in regulatory activity and targeting, and a C-terminal catalytic domain termed the MTase C5-type domain. In some embodiments, an effector domain in embodiments provided herein includes a catalytically active portion of a DNMT3A or a DNMT3B that contains a catalytically active C-terminal domain. In particular, isolated catalytic domains of DNMT3a and DNMT3b are catalytically active (see e.g. Gowher and Jeltsch (2002) J. Biol. Chem., 277:20409).

[0358] In some embodiments, the DNMT3 domain may be an effector domain of DNMT3A or DNMT3B that is catalytically active. In some embodiments, the effector domain may be the full-length of DNMT3A or DNMT3B or a catalytically active portion thereof. In some embodiments, the effector domain is a catalytically active portion that is less than the full-length sequence of DNMT3A or DNMT3B. In some embodiments, a catalytically active portion is a contiguous sequence of amino acids that confers DNA methyltransferase activity, such as by mediating methylation of a cytosine base to methylated 5-methylcytosine. In some embodiments, the contiguous sequence of amino acids is a contiguous C-terminal portion of a DNMT3 protein, such as DNMT3A, or DNMT3B, that is from 280 amino acids to 330 amino acids in length. In some embodiments, the contiguous portion is 280 amino acids, 290 amino acids, 300 amino acids, 310 amino acids, 320 amino acids, or 330 amino acids in length, or is a length of any value between any of the foregoing. In some embodiments, a catalytically active portion of a DNMT, such as a DNMT3, includes a SAM-dependent MTase C5-type domain. In some embodiments, the DNMT3 domain, such as a domain of DNMT3A or DNMT3B, is of human origin.

[0359] In some embodiments, the effector domain is from DNMT3A or a catalytically active portion or variant thereof. An exemplary DNMT3A domain is set forth in SEQ ID NO:604, or is a catalytically active portion thereof, or is an amino acid sequence that has at least 90%, 91%, 92%, 93%, 94%, 95%, 96%, 97%, 98%, or 99% sequence identity to SEQ ID NO:604 or the catalytically active portion thereof that exhibits DNA methyltransferase activity. In some embodiments, the catalytically active portion is a contiguous portion of amino acids of SEQ ID NO:604 that includes the SAM-dependent MTase C5-type domain (e.g. corresponding to amino acids 634-912 of SEQ ID NO:604. In some embodiments, the contiguous sequence of amino acids of SEQ ID NO: 604 includes at least 250 amino acids, 275 amino acids, 300 amino acids or 325 amino acids, or any value between any of the foregoing. In some embodiments, the contiguous sequence of amino acids is a contiguous portion of SEQ ID NO:604 that includes amino acids 634-912 and is from 280 amino acids to 330 amino acids in length. In some embodiments, the contiguous portion is 280 amino acids, 290 amino acids, 300 amino acids, 310 amino acids, 320 amino acids, or 330 amino acids in length, or is a length of any value between any of the foregoing.

[0360] In some embodiments, the DNMT3A domain is set forth in SEQ ID NO:661, or is a catalytically active portion thereof, or is an amino acid sequence that has at least 90%, 91%, 92%, 93%, 94%, 95%, 96%, 97%, 98%, or 99% sequence identity to SEQ ID NO:661 or the catalytically active portion thereof that exhibits DNA methyltransferase activity. In some embodiments, the DNMT3A domain is set forth in SEQ ID NO:661.

[0361] In some embodiments, the DNMT3A domain is set forth in SEQ ID NO:665, or is a catalytically active portion thereof, or is an amino acid sequence that has at least 90%, 91%, 92%, 93%, 94%, 95%, 96%, 97%, 98%, or 99% sequence identity to SEQ ID NO:665 or the catalytically active portion thereof that exhibits DNA methyltransferase activity. In some embodiments, the DNMT3A domain is set forth in SEQ ID NO:665.

[0362] In some embodiments, the effector domain is from DNMT3B or a catalytically active portion or variant thereof that exhibits DNA methyltransferase activity. An exemplary DNMT3B domain is set forth in SEQ ID NO:605, or is a catalytically active portion thereof, or is an amino acid sequence that has at least 90%, 91%, 92%, 93%, 94%, 95%, 96%, 97%, 98%, or 99% sequence identity to SEQ ID NO:605 or the catalytically active portion thereof that exhibits DNA methyltransferase activity. In some embodiments, the catalytically active portion is a contiguous portion of amino acids of SEQ ID NO:605 that includes the SAM-dependent MTase C5-type domain (e.g. corresponding to amino acids 575-853 of SEQ ID NO:605). In some embodiments, the contiguous sequence of amino acids of SEQ ID NO: 605 includes at least 250 amino acids, 275 amino acids, 300 amino acids or 325 amino acids, or any value between any of the foregoing. In some embodiments, the contiguous sequence of amino acids is a contiguous portion of SEQ ID NO:605 that includes amino acids 575-853 and is from 280 amino acids to 330 amino acids in length. In some embodiments, the contiguous portion is 280 amino acids, 290 amino acids, 300 amino acids, 310 amino acids, 320 amino acids, or 330 amino acids in length, or is a length of any value between any of the foregoing.

[0363] Any of a variety of assays are known to assess or monitor methyltransferase (MTase) activity. In some embodiments, exemplary assays to assess DNA methyltransferase activity include, but are not limited to, radio DNA MTase assays, colorimetric DNA MTase activity assays, fluorescent DNA MTase activity assays, chemiluminescent/bioluminescent DNA MTase activity assays, electrochemical DNA MTase activity assays, and elctrogenerated chemiluminescence (ECL) DNA MTase activity assays. Exemplary assays are described in Poh et al. Theranostics, 2016, 6:369-391; Li et al., Methods Appl. Fluoresc., 2017, 5:012002; Deng et al., Anal Chem., 2014, 86:2117-23; and Ma et al. J Mater Chem B., 2020, 8:3488-3501.

[0364] In some embodiments, the effector domain includes a DNMT3L, or a portion or a variant of DNMT3L or the portion thereof. DNMT3L (DNA (cytosine-5)-methyltransferase 3-like) is a catalytically inactive regulatory factor of DNA methyltransferases that can either promote or inhibit DNA methylation depending on the context. DNMT3L is essential for the function of DNMT3A and DNMT3B; DNMT3L interacts with DNMT3A and DNMT3B and enhances their catalytic activity. For instance, DNMT3L interacts with the catalytic domain of DNMT3A or DNMT3B to form a heterodimer, demonstrating that DNMT3L has dual functions of binding an unmethylated histone tail and activating DNA methyltransferase. In some embodiments, reference to a portion or variant of a DNMT3L for purposes herein refers to a sufficient C-terminal sequence portion of DNMT3L that interacts with the catalytic domain of DNMT3A or DNMT3B and is able to stimulate or promote DNA methyltransferase activity of DNMT3A or DNMT3B (see e.g. Jia et al. Nature, 2007, 449:248-251; Gowher et al. J. Biol. Chem., 2005, 280: 13341-13348). In some embodiments, the DNMT3L or portion thereof is of animal origin. In some embodiments, the domain from DNMT3L is of murine origin. In some embodiments, the domain from DNMT3L is of human origin.

[0365] In some embodiments, the DNMT3L domain is a DNMT3L, or a C-terminal portion or variant thereof, that interacts with the catalytic domain of DNMT3A to form a heterodimer to provide for a more active DNA methyltransferase. In some embodiments, the effector domain is a fusion domain of a DNMT3A domain and the DNMT3L domain (DNMT3A/3L).

[0366] In some embodiments, the DNMT3L domain is a DNMT3L, or a C-terminal portion or variant thereof, that interacts with the catalytic domain of DNMT3B to form a heterodimer to provide for a more active DNA methyltransferase. In some embodiments, the effector domain is a fusion domain of a DNMT3B domain and the DNMT3L domain (DNMT3B/3L).

[0367] In some embodiments, the DNMT3L domain is a C-terminal portion of DNMT3L composed of a contiguous C-terminal portion of the full-length DNMT3L that does not include the N-terminal cysteine-rich ATRX-Dnmt3-Dnmt3L (ADD) domain (e.g. corresponding to residues 41-73 of SEQ ID NO: 607 or 75-207 of the sequence set forth in SEQ ID NO:668). In some embodiments, the DNMT3L domain is a contiguous C-terminal portion of DNMT3L that is less than 220 amino acids in length, such as between 100 and 215 amino acids, such as at or about 100, 110, 120, 130, 140, 150, 160, 170, 180, 190, 200, 210 or 215 amino acids in length, or a length between a value of any of the foregoing. In some embodiments, the DNMT3L domain is a contiguous C-terminal portion of DNMT3L that is 205, 206, 207, 208, 209, 210, 211, 212, 213, 214 or 215 amino acids in length.

[0368] An exemplary DNMT3L domain is set forth in SEQ ID NO:668, or is a portion thereof, or is an amino acid sequence that has at least 90%, 91%, 92%, 93%, 94%, 95%, 96%, 97%, 98%, or 99% sequence identity to SEQ ID NO:668 or the portion thereof. In some embodiments, the DNMT3L domain is a contiguous C-terminal portion of the full-length DNMT3L set forth in SEQ ID NO: 668 that does not include the N-terminal cysteine-rich ATRX-Dnmt3-Dnmt3L (ADD) domain (corresponding to residues 75-207 of the sequence set forth in SEQ ID NO:668). In some embodiments, the DNMT3L domain is a contiguous C-terminal portion of the full-length DNMT3L set forth in SEQ ID NO: 668 that is less than 220 amino acids in length, such as between 100 and 215 amino acids, such as at or about 100, 110, 120, 130, 140, 150, 160, 170, 180, 190, 200, 210 or 215 amino acids in length, or a length between a value of any of the foregoing. In some embodiments, the DNMT3L domain is a contiguous C-terminal portion of the full-length DNMT3L set forth in SEQ ID NO: 668 that is 205, 206, 207, 208, 209, 210, 211, 212, 213, 214 or 215 amino acids in length.

[0369] In some embodiments, the DNMT3L domain is set forth in SEQ ID NO:664, or is a portion thereof, or is an amino acid sequence that has at least 90%, 91%, 92%, 93%, 94%, 95%, 96%, 97%, 98%, or 99% sequence identity to SEQ ID NO:664. In some embodiments, the DNMT3L domain is set forth in SEQ ID NO:664. In some embodiments, the DNMT3L domain does not contain an N-terminal methionine, such as set forth in SEQ ID NO: 664.

[0370] In some embodiments, the DNMT3L domain is a human or humanized DNMT3L. Corresponding sequences of human are highly homologous to the Dnmt3L derived from mouse and have a sequence identity of at least 90% with the murine sequence. It is within the level of a skilled artisan to humanize a non-human sequence of a DNMT3L domain, such as a domain of a murine DNMT3L. In some embodiments, the effector domain includes a DNMT3L domain that is a humanized variant of the murine DMT3L set forth in SEQ ID NO:668 or a portion thereof that is able to interact with DNMT3A or DNMT3A. In some embodiments, the effector domain includes a DNMT3L domain that is a humanized variant of the murine C-terminal portion of DNMT3L set forth in SEQ ID NO:664.

[0371] An exemplary DNMT3L domain of human origin is set forth in SEQ ID NO:607, or is a portion thereof, or is an amino acid sequence that has at least 90%, 91%, 92%, 93%, 94%, 95%, 96%, 97%, 98%, or 99% sequence identity to SEQ ID NO:607 or the portion thereof. In some embodiments, the DNMT3L domain is a contiguous C-terminal portion of the full-length DNMT3L set forth in SEQ ID NO: 607 that does not include the N-terminal cysteine-rich ATRX-Dnmt3-Dnmt3L (ADD) domain (corresponding to residues 41-73 of the sequence set forth in SEQ ID NO:607). In some embodiments, the DNMT3L domain is a contiguous C-terminal portion of the full-length DNMT3L set forth in SEQ ID NO: 607 that is less than 220 amino acids in length, such as between 100 and 215 amino acids, such as at or about 100, 110, 120, 130, 140, 150, 160, 170, 180, 190, 200, 210 or 215 amino acids in length, or a length between a value of any of the foregoing. In some embodiments, the DNMT3L domain is a contiguous C-terminal portion of the full-length DNMT3L set forth in SEQ ID NO: 607 that is 205, 206, 207, 208, 209, 210, 211, 212, 213, 214 or 215 amino acids in length.

[0372] In some embodiments, the DNMT3L domain comprises the sequence set forth in SEQ ID NO:666, or is a portion thereof, or is an amino acid sequence that has at least 90%, 91%, 92%, 93%, 94%, 95%, 96%, 97%, 98%, or 99% sequence identity to SEQ ID NO:666. In some embodiments, the DNMT3L domain is set forth in SEQ ID NO:666. In some embodiments, the DNMT3L domain contains an N-terminal methionine.

[0373] In some embodiments, the effector domain comprises a fusion of DNMT3A and DNMT3L (DNMT3A/L). The fusion protein contains DNMT3A and DNMT3L domains that can be any as described above. In some embodiments, the fusion protein contains the DNMT3A domain set forth in SEQ ID NO: 661 and the DNMT3L domain set forth in SEQ ID NO: 668, arranged in any order. In some embodiments, the fusion protein contains the DNMT3A domain set forth in SEQ ID NO: 661 and the DNMT3L domain set forth in SEQ ID NO:664, arranged in any order. In some embodiments, the fusion protein contains the DNMT3A domain set forth in SEQ ID NO:661 and the DNMT3L domain set forth in SEQ ID NO:666, arranged in any order. In some embodiments, the fusion protein contains the DNMT3A domain set forth in SEQ ID NO: 665 and the DNMT3L domain set forth in SEQ ID NO: 668, arranged in any order. In some embodiments, the fusion protein contains the DNMT3A domain set forth in SEQ ID NO: 665 and the DNMT3L domain set forth in SEQ ID NO:664, arranged in any order. In some embodiments, the fusion protein contains the DNMT3A domain set forth in SEQ ID NO:665 and the DNMT3L domain set forth in SEQ ID NO:666, arranged in any order. In some embodiments, the DNMT3A and DNMT3L domains present in a provided fusion protein are separated from each other in the fusion protein by an intervening sequence, such as the DNA-binding domain, another effector domain or a linker. In some embodiments, the domains are either directly linked to each other or they are linked via a linker, such as a peptide linker. In some embodiments, the DNMT3A and DNMT3L domains are connected as a fusion domain via a linker that connects the DNMT3A domain and the DNMT3L domain. Exemplary linkers are described herein. In some embodiments, the linker is the linker set forth in SEQ ID NO: 667.

[0374] An exemplary DNMT3A/L fusion domain is set forth in SEQ ID NO:651. In some embodiments, the effector domain comprises the sequence set forth in SEQ ID NO:651, or an amino acid sequence that has at least 90%, 91%, 92%, 93%, 94%, 95%, 96%, 97%, 98%, or 99% sequence identity to SEQ ID NO:651 and exhibits DNA methyltransferase activity.

[0375] In some embodiments, the effector domain may comprise a LSD1 domain. LSD1 (also known as Lysine-specific histone demethylase 1A) is a histone demethylase that can demethylate lysine residues of histone H3, thereby acting as a coactivator or a corepressor, depending on the context. LSD1, including in dCas fusion proteins, has been described, for example, in WO 2013/176772, WO 2014/152432, and Kearns, N. A. et al. Nat. Methods. 12(5):401-403 (2015). An exemplary LSD1 polypeptide is set forth in SEQ ID NO:606. In some embodiments, the effector domain comprises the sequence set forth in SEQ ID NO:606, or a portion thereof, or an amino acid sequence that has at least 90%, 91%, 92%, 93%, 94%, 95%, 96%, 97%, 98%, or 99% sequence identity to any of the foregoing.

[0376] In some embodiments, the effector domain may comprise an EZH2 domain. EZH2 (also known as Histone-lysine N-methyltransferase EZH2) is a Catalytic subunit of the PRC2/EED-EZH2 complex, which methylates ‘Lys-9’ (H3K9me) and ‘Lys-27’ (H3K27me) of histone H3, in some aspects leading to transcriptional repression of the affected target gene. EZH2, including in dCas fusion proteins, has been described, for example, in O'Geen, H. et al., Epigenetics Chromatin. 12(1):26 (2019). An exemplary EZH2 polypeptide is set forth in SEQ ID NO:608. In some embodiments, the effector domain comprises the sequence set forth in SEQ ID NO:608, or a portion thereof, or an amino acid sequence that has at least 90%, 91%, 92%, 93%, 94%, 95%, 96%, 97%, 98%, or 99% sequence identity to any of the foregoing.

[0377] In some embodiments, the effector domain may comprise a SunTag domain. SunTag is a repeating peptide array, which can recruit multiple copies of an antibody-fusion protein that binds the repeating peptide. The antibody-fusion protein may comprise an additional effector domain, such as a transcription repression domain (e.g. KRAB), to reduce transcription of the target gene. SunTag, including in dCas fusion proteins for gene modulation have been described, for example, in WO 2016/011070 and Tanenbaum, M. et al. Cell. 159(3):635-646 (2014). An exemplary SunTag effector domain includes a repeating GCN4 peptide having the amino acid sequence LLPKNYHLENEVARLKKLVGER (SEQ ID NO: 641) separated by linkers having the amino acid sequence GGSGG (SEQ ID NO: 642). In some embodiments, the effector domain comprises at least one copy of the sequence set forth in SEQ ID NO: 641, or a portion thereof, or an amino acid sequence that has at least 90%, 91%, 92%, 93%, 94%, 95%, 96%, 97%, 98%, or 99% sequence identity to any of the foregoing. In some embodiments, the SunTag effector domain recruits an antibody-fusion protein that comprises KRAB and binds the GCN4 peptide.

[0378] In some embodiments, the epigenetic-modifying DNA-targeting system comprises at least one effector domain comprising a DNA methyltransferase (e.g., DNMT3A or DNMT3B). In some embodiments, the epigenetic-modifying DNA-targeting system comprises at least one effector domain comprising a repressor domain (e.g., KRAB). In some embodiments, the epigenetic-modifying DNA-targeting system comprising at least one effector domain comprises a DNA methyltransferase and a histone methyltransferase (e.g., DNMT3A-KRAB or DNMT3A/L-KRAB).

[0379] F. Fusion Proteins

[0380] In some aspects, the DNA-targeting systems provided herein include fusion proteins. In some embodiments, provided herein is a DNA-targeting system comprising at least one DNA-targeting module, in which each of the at least one DNA-targeting module comprises a fusion protein comprising: (a) a DNA-binding domain for targeting to a target site in a Hepatitis B viral DNA sequence, such as a gene or regulatory element thereof, for example any as described herein, and (b) at least one transcriptional repressor effector domain. In some aspects, the fusion protein comprises at least one of any of the DNA-binding domains described herein, and at least one of any of the effector domains described herein. For instance, in some embodiments, the fusion protein contains a CRISPR-Cas or variant thereof, such as described in Section I.B, and at least one transcriptional repressor effector domain, such as any described in Section I.E. In some aspects, the fusion protein is targeted to a target site in a gene or regulatory element thereof, and leads to reduced or repressed transcription of the gene.

[0381] In some embodiments, the DNA-binding domain and effector domain of the fusion protein are heterologous, i.e. the domains are from different species, or at least one of the domains is not found in nature. In some aspects, the fusion protein is an engineered fusion protein, i.e. the fusion protein is not found in nature.

[0382] In some embodiments, the at least one effector domain is fused to the N-terminus, the C-terminus, or both the N-terminus and the C-terminus, of the DNA-binding domain or a component thereof. In some embodiments, the at least one effector domain may be fused to the DNA-binding domain directly, or via any intervening amino acid sequence, such as a linker sequence or a nuclear localization sequence (NLS).

[0383] In some embodiments, the fusion protein of a provided DNA-binding system, or a DNA-targeting module thereof, comprises, from N- to C-terminal order: a transcriptional repressor effector domain and a DNA-binding domain. In some embodiments, the fusion protein of a provided DNA-binding system, or a DNA-targeting module thereof, comprises, from N- to C-terminal order: a DNA-binding domain and a transcriptional repressor effector domain.

[0384] In some embodiments, the at least one effector domain of the fusion protein includes more than one effector domains. In some embodiments, the fusion protein includes 2, 3 or 4 effector domains. In some embodiments, at least two of the effector domains of the fusion protein are different. In some embodiments, each of the effector domains of the fusion protein are different. In some embodiments, the at least one effector domain includes two effector domains in which the two effector domains are different. In some embodiments, the effector domains and the DNA-binding domain can be arranged in any order.

[0385] In some embodiments, the at least one effector domain of the fusion protein includes two different effector domains. The two different effector domains and the DNA-binding domain can be arranged in any order. In some embodiments, each of the effector domains are N-terminal to the DNA-binding domain in which a first effector domain is fused to the N-terminus of the second effector domain and the second effector domain is fused to the N-terminus of the DNA-binding domain. In some embodiments, the fusion protein of a provided DNA-binding system, or a DNA-targeting module thereof, comprises from N- to C-terminal order: a first transcriptional repressor effector domain, a second transcriptional repressor effector domain and the DNA binding domain. In some embodiments, each of the effector domains are C-terminal to the DNA-binding domain in which a first effector domain is fused to the C-terminus of the DNA-binding domain and the second effector domain is fused to the C-terminus of the first effector domain. In some embodiments, the fusion protein of a provided DNA-binding system, or a DNA-targeting module thereof, comprises from N- to C-terminal order: a DNA-binding domain, a first transcriptional repressor effector domain, and a second transcriptional repressor effector domain. In some embodiments, the DNA-binding domain is between the effector domains, in which one effector domain is fused to the N-terminus of the DNA-binding domain and the other effector domain is fused to the C-terminus of the DNA-binding domain. In some embodiments, the fusion protein of a provided DNA-binding system, or a DNA-targeting module thereof, comprises from N- to C-terminal order: a first transcriptional effector domain, a DNA-binding domain, and a second transcriptional repressor effector domain. In some embodiments, one or more of the components may be fused to each other directly, or via any intervening amino acid sequence, such as via a linker sequence or a nuclear localization sequence (NLS).

[0386] In some embodiments, the fusion protein comprises one or more linkers. In some embodiments, the one or more linkers connect the DNA-binding domain or a component thereof to at least one effector domain of the fusion protein. A linker may be included anywhere in the polypeptide sequence of the fusion protein, for example, between the effector domain and the DNA-binding domain or a component thereof. In some embodiments, the one or more linkers connect two effector domains of the fusion protein. Depending on the number of effector domains, the fusion protein can include 1, 2, 3, 4 or more linkers. In some embodiments, the linkers may be the same or they may be different.

[0387] A linker may be of any length and designed to promote or restrict the mobility of components in the fusion protein. In some embodiments, the linker is a peptide linker. A linker may comprise any amino acid sequence of about 2 to about 100, about 5 to about 80, about 10 to about 60, or about 20 to about 50 amino acids. A linker may comprise an amino acid sequence of at least about 2, 3, 4, 5, 10, 15, 20, 25, 30, 35, 40, 45, 50, 55, 60, 65, 70, 75, 80 or 85 amino acids. A linker may comprise an amino acid sequence of less than about 100, 90, 80, 70, 60, 50, or 40 amino acids. A skilled artisan can readily choose an appropriate linker for the connection of two domains. In some embodiments, the linker is a flexible linker. Flexible linkers are generally composed of small, non-polar or polar residues such as glycine, serine or threonine. In some embodiments, the linker is the Gly₄Ser₍ₙ₎ linker, whereby n is an integer of 1 to 10. A linker may include sequential or tandem repeats of an amino acid sequence that is 2 to 20 amino acids in length. Linkers may be rich in amino acids glycine (G), serine (S), and/or alanine (A). Linkers may include, for example, a GS linker. An exemplary GS linker is represented by the sequence GGGGS (SEQ ID NO: 609), or the formula (GGGGS)n, wherein n is an integer that represents the number of times the GGGGS sequence is repeated (e.g. between 1 and 10 times). The number of times a linker sequence is repeated can be adjusted to optimize the linker length and achieve appropriate separation of the functional domains. Other examples of linkers may include, for example, GGGGG (SEQ ID NO: 610), GGAGG (SEQ ID NO: 611), GGGGSSS (SEQ ID NO: 612), or GGGGAAA (SEQ ID NO: 613).

[0388] In some embodiments, artificial linker sequences can be used. In some embodiments, the linker is EASGSGRASPGIPGSTR (SEQ ID NO: 672). In some embodiments, the linker is linker is GIHGVPAA (SEQ ID NO: 673). In some embodiments, the linker is SSGNSNANSRGPSFSSGLVPLSLRGSH (SEQ ID NO: 667). In some embodiments, the linker is

(SEQ ID NO: 677)
KRPAATKKAGQAKKKKASDAKSLTAWS.

[0389] In some embodiments, the linker is an XTEN linker. In some aspects, an XTEN linker is a recombinant polypeptide (e.g., an unstructured recombinant peptide) lacking hydrophobic amino acid residues. Exemplary XTEN linkers are described in, for example, Schellenberger et al., Nature Biotechnology 27, 1186-1190 (2009) or WO 2021/247570. In some embodiments, inclusion of a linker in the fusion protein leads to enhanced repression of the target gene. In some embodiments, a linker comprises the sequence set forth in SEQ ID NO:643, or a portion thereof, or an amino acid sequence that has at least 90%, 91%, 92%, 93%, 94%, 95%, 96%, 97%, 98%, or 99% sequence identity to any of the foregoing. In some aspects, the linker comprises the sequence set forth in SEQ ID NO:643, or a contiguous portion of SEQ ID NO:643 of at least 5, 10, 15, 20, 25, 30, 35, 40, 45, 50, 55, 60, 65, 70 or 75 amino acids. In some aspects, the linker consists of the sequence set forth in SEQ ID NO:643, or a contiguous portion of SEQ ID NO:643 of at least 5, 10, 15, 20, 25, 30, 35, 40, 45, 50, 55, 60, 65, 70 or 75 amino acids. In some embodiments, the linker comprises the sequence set forth in SEQ ID NO:643. In some embodiments, the linker consist of the sequence set forth in SEQ ID NO:643. In some embodiments, a linker comprises the sequence set forth in SEQ ID NO:658, or a portion thereof, or an amino acid sequence that has at least 90%, 91%, 92%, 93%, 94%, 95%, 96%, 97%, 98%, or 99% sequence identity to any of the foregoing. In some aspects, the linker comprises the sequence set forth in SEQ ID NO:658, or a contiguous portion of SEQ ID NO:658 of at least 5, 10, or 15 amino acids. In some aspects, the linker consists of the sequence set forth in SEQ ID NO:658, or a contiguous portion of SEQ ID NO:658 of at least 5, 10 or 15 amino acids. In some embodiments, the linker comprises the sequence set forth in SEQ ID NO:658. In some embodiments, the linker consist of the sequence set forth in SEQ ID NO:658. In some embodiments, a linker comprises a linker described in WO 2021/247570. Appropriate linkers may be selected or designed based rational criteria known in the art, for example as described in Chen et al. Adv. Drug Deliv. Rev. 65(10):1357-1369 (2013).

[0390] In some embodiments, a fusion protein of the DNA-targeting system, or a DNA-targeting module thereof, comprises one or more nuclear localization signals (NLS). In some embodiments, a fusion protein described herein comprises one or more nuclear localization sequences (NLSs), such as about or more than about 1, 2, 3, 4, 5, 6, 7, 8, 9, 10, or more NLSs. When more than one NLS is present, each may be selected independently of the others, such that a single NLS may be present in more than one copy and/or in combination with one or more other NLSs present in one or more copies. Non-limiting examples of NLSs include an NLS sequence derived from: the NLS of the SV40 virus large T-antigen, having the amino acid sequence PKKKRKV(SEQ ID NO: 614); the NLS from nucleoplasmin (e.g. the nucleoplasmin bipartite NLS with the sequence KRPAATKKAGQAKKKK (SEQ ID NO: 592); the c-myc NLS having the amino acid sequence PAAKRVKLD (SEQ ID NO: 615) or RQRRNELKRSP (SEQ ID NO: 616); the hRNPA1 M9 NLS having the sequence NQSSNFGPMKGGNFGGRSSGPYGGGGQYFAKPRNQGGY (SEQ ID NO: 617); the sequence RMRIZFKNKGKDTAELRRRRVEVSVELRKAKKDEQILKRRNV (SEQ ID NO: 618) of the IBB domain from importin-alpha; the sequences VSRKRPRP (SEQ ID NO: 619) and PPKKARED (SEQ ID NO: 620) of the myoma T protein; the sequence PQPKKKPL (SEQ ID NO: 621) of human p53; the sequence SALIKKKKKMAP (SEQ ID NO: 622) of mouse c-abl IV; the sequences DRLRR (SEQ ID NO: 623) and PKQKKRK (SEQ ID NO: 624) of the influenza virus NS1; the sequence RKLKKKIKKL (SEQ ID NO: 625) of the Hepatitis virus delta antigen; the sequence REKKKFLKRR (SEQ ID NO: 626) of the mouse MxI protein; the sequence KRKGDEVDGVDEVAKKKSKK (SEQ ID NO: 627) of the human poly(ADP-ribose) polymerase; and the sequence RKCLQAGMNLEARKTKK (SEQ ID NO: 628) of the steroid hormone receptors (human) glucocorticoid. In general, the one or more NLSs are of sufficient strength to drive accumulation of the fusion protein in a detectable amount in the nucleus of a eukaryotic cell. In general, strength of nuclear localization activity may derive from the number of NLSs in the fusion protein, the particular NLS(s) used, or a combination of these factors. Detection of accumulation in the nucleus may be performed by any suitable technique. For example, a detectable marker may be fused to the fusion protein, such that location within a cell may be visualized, such as in combination with a means for detecting the location of the nucleus (e.g. a stain specific for the nucleus such as DAPI). Cell nuclei may also be isolated from cells, the contents of which may then be analyzed by any suitable process for detecting protein, such as immunohistochemistry, Western blot, or enzyme activity assay. Accumulation in the nucleus may also be determined indirectly, such as by an assay for the effect of the fusion protein (e.g. an assay for altered gene expression activity in a cell transformed with the DNA-targeting system comprising the fusion protein), as compared to a control condition (e.g. an untransformed cell). In some embodiments, the NLS comprises the sequence set forth in SEQ ID NO: 592 (KRPAATKKAGQAKKKK), or a portion thereof.

[0391] In some embodiments, the NLS is linked to the N-terminus or the C-terminus of the DNA-binding domain via a linker. In some embodiments, the NLS is linked to the N-terminus or the C-terminus of an effector domain via a linker. The linker may be any linker as described above. In some embodiments, the linker is GIHGVPAA (SEQ ID NO: 673). In some embodiments, the NLS and linker has the sequence PKKKRKVGIHGVPAA (SEQ ID NO: 670).

[0392] In some configurations, the N- or C-terminus of the fusion protein can be linked to a moiety for detection and/or purification. In some aspects, the moiety is or includes a Flag tag DYKDDDDK (SEQ 1D NO:671), a 3×Flag tag MDYKDHDGDYKDHD1 DYKDDDDK (SEQ ID NO: 674, an HA tag YPYDVPDYA (SEQ ID NO: 675) or a His tag. such as HHHHHH (SEQ ID NO: 676).

[0393] 1. Split Fusion Proteins

[0394] In some embodiments, the fusion protein is a split protein, i.e. comprises two or more separate polypeptide domains that interact or self-assemble to form a functional fusion protein. In some aspects, the split fusion protein comprises a dCas9 and an effector domain. In some aspects, the fusion protein comprises a split dCas9-effector domain fusion protein.

[0395] In some embodiments, the split fusion protein is assembled from separate polypeptide domains comprising trans-splicing inteins. Inteins are internal protein elements that self-excise from their host protein and catalyze ligation of flanking sequences with a peptide bond. In some embodiments, the split fusion protein is assembled from a first polypeptide comprising an N-terminal intein and a second polypeptide comprising a C-terminal intein. In some embodiments, the N terminal intein Is the N terminal Npu Intein set forth in SEQ ID NO:653. In some embodiments, the C terminal intein is the C terminal Npu intein set forth in SEQ ID NO:655. In some embodiments, the N terminal intein is the N terminal Npu Intein set forth in SEQ ID NO:652. In some embodiments, the C terminal intein is the C terminal Npu intein set forth in SEQ ID NO:654.

[0396] In some embodiments, the split fusion protein comprises a split dCas9-effector domain fusion protein assembled from two polypeptides. In an exemplary embodiment, the first polypeptide comprises an effector domain catalytic domain and an N-terminal fragment of dSpCas9, followed by an N terminal Npu Intein (effector domain-dSpCas9-573N), and the second polypeptide comprises a C terminal Npu Intein, followed by a C-terminal fragment of dSpCas9 (dSpCas9-573C; SEQ ID NO: 657). The N- and C-terminal fragments of the fusion protein are split at position 573Glu of the dSpCas9 molecule, with reference to SEQ ID NO: 598 (corresponding to residue 572Glu of the dSpCas9 molecule set forth in SEQ ID NO: 599). In some aspects, the N-terminal Npu Intein (SEQ ID NO:653) and C-terminal Npu Intein (set forth in SEQ ID NO:655) may self-excise and ligate the two fragments, thereby forming the full-length dSpCas9-effector domain fusion protein when expressed in a cell.

[0397] In some embodiments, the polypeptides of a split protein may interact non-covalently to form a complex that recapitulates the activity of the non-split protein. For example, two domains of a Cas enzyme expressed as separate polypeptides may be recruited by a gRNA to form a ternary complex that recapitulates the activity of the full-length Cas enzyme in complex with the gRNA, for example as described in Wright et al. PNAS 112(10):2984-2989 (2015). In some embodiments, assembly of the split protein is inducible (e.g. light inducible, chemically inducible, small-molecule inducible).

[0398] In some aspects, the two polypeptides of a split fusion protein may be delivered and/or expressed from separate vectors, such as any of the vectors described herein. In some embodiments, the two polypeptides of a split fusion protein may be delivered to a cell and/or expressed from two separate AAV vectors, i.e. using a split AAV-based approach, for example as described in WO 2017/197238.

[0399] Approaches for the rationale design of split proteins and their delivery, including Cas proteins and fusions thereof, are described, for example, in WO 2016/114972, WO 2017/197238, Zetsche. et al. Nat. Biotechnol. 33(2):139-42 (2015), Wright et al. PNAS 112(10):2984-2989 (2015), Truong. et al. Nucleic Acids Res. 43, 6450-6458 (2015), and Fine et al. Sci. Rep. 5, 10777 (2015).

[0400] 2. Exemplary CRISPR-based Fusion Proteins

[0401] In some embodiments, fusion proteins of provided DNA-targeting systems, or DNA-targeting modules thereof, are composed of a DNA-binding domain targeting to a target site in a Hepatitis B viral DNA sequence, such as a gene or regulatory element thereof, and at least one transcriptional repressor effector domain. The DNA-binding domain and transcriptional repressor domain include any as described above. Exemplary fusion proteins are further described below.

[0402] In some embodiments, a fusion protein named herein comprises elements of the named fusion protein in any configuration or order. For example, a dCas9-KRAB fusion protein may comprise a KRAB domain fused to the N- or C-terminus of a dSpCas9 molecule. In another example, a dSpCas9-KRAB-DNMT3A/L fusion protein may comprise dSpCas9, KRAB, and DNMT3A/L in any order. For example, a dSpCas9-KRAB-DNMT3A/L fusion protein may comprise from N-terminal to C-terminal, DNMT3A/L, dSpCas9, and KRAB. A fusion protein named herein may comprise additional elements. For example, a dSpCas9-KRAB-DNMT3A/L fusion protein may comprise one or more linkers, NLS sequences, or other sequences in any combination or order.

[0403] In some embodiments, the fusion protein of the DNA-targeting system, or a DNA-targeting module thereof, contains a dSpCas9 set forth in SEQ ID NO:599 and an ERF domain set forth in SEQ ID NO:600. In some embodiments, the fusion protein of the DNA-targeting system, or a DNA-targeting module thereof, contains a dSpCas9 set forth in SEQ ID NO:599 and a MXI1 domain set forth in SEQ ID NO:601. In some embodiments, the fusion protein of the DNA-targeting system, or a DNA-targeting module thereof, contains a dSpCas9 set forth in SEQ ID NO: 599 and a SID4X domain set forth in SEQ ID NO:602. In some embodiments, the fusion protein of the DNA-targeting system, or a DNA-targeting module thereof, contains a dSpCas9 set forth in SEQ ID NO:599 and a MAD-SID domain set forth in SEQ ID NO:603. In some embodiments, the fusion protein of the DNA-targeting system, or a DNA-targeting module thereof, contains a dSpCas9 set forth in SEQ ID NO:599 and a DNMT3A domain set forth in SEQ ID NO:604. In some embodiments, the fusion protein of the DNA-targeting system, or a DNA-targeting module thereof, contains a dSpCas9 set forth in SEQ ID NO:599 and a DNMT3A domain set forth in SEQ ID NO:661. In some embodiments, the fusion protein of the DNA-targeting system, or a DNA-targeting module thereof, contains a dSpCas9 set forth in SEQ ID NO:599 and a DNMT3A domain set forth in SEQ ID NO:665. In some embodiments, the fusion protein of the DNA-targeting system, or a DNA-targeting module thereof, contains a dSpCas9 set forth in SEQ ID NO:599 and a DNMT3B domain set forth in SEQ ID NO:605. In some embodiments, the fusion protein of the DNA-targeting system, or a DNA-targeting module thereof, contains a dSpCas9 set forth in SEQ ID NO:599 and a LSD1 domain set forth in SEQ ID NO:606. In some embodiments, the fusion protein of the DNA-targeting system, or a DNA-targeting module thereof, contains a dSpCas9 set forth in SEQ ID NO:599 and a DNMT3L domain set forth in SEQ ID NO:607. In some embodiments, the fusion protein of the DNA-targeting system, or a DNA-targeting module thereof, contains a dSpCas9 set forth in SEQ ID NO:599 and a EZH2 domain set forth in SEQ ID NO:608. In some embodiments, the fusion protein of the DNA-targeting system, or a DNA-targeting module thereof, contains a dSpCas9 set forth in SEQ ID NO:599 and a KRAB domain set forth in SEQ ID NO:590. In some embodiments, the fusion protein of the DNA-targeting system, or a DNA-targeting module thereof, contains a dSpCas9 set forth in SEQ ID NO:599 and a KRAB domain set forth in SEQ ID NO:669. In some embodiments, there is present a linker and/or NLS between the dSpCas9 and the effector domain. In some embodiments, a NLS may be present at the N-terminus or C-terminus of the fusion protein.

[0404] In some embodiments, a fusion protein of a DNA-targeting system, or a DNA-targeting module thereof, provided herein comprises a DNA-binding domain and a KRAB domain. In some embodiments, the DNA-binding domain is a catalytically inactive Cas enzyme (dCas). In some embodiments, the Cas is a dCas9, such as a dSaCas9 or a dSpCas9. In some embodiments, the DNA-binding domain is dSpCas9. In some embodiments, the DNA-binding domain is a dSpCas9 set forth in SEQ ID NO: 599 and the KRAB domain is set forth in SEQ ID NO:590. In some embodiments, the DNA-binding domain is a dSpCas9 set forth in SEQ ID NO: 599 and the KRAB domain is set forth in SEQ ID NO:669. In some embodiments, the fusion protein may include one or more linker or NLS, such as at the N- or C-terminus of the fusion protein or between the Cas and the KRAB domain. The linker or NLS can be any as described herein.

[0405] In some embodiments, the fusion protein of a DNA-targeting system, or a DNA-targeting module thereof, comprises, from N- to C-terminal order: NLS and/or a linker, dSpCas9 set forth in SEQ ID NO:599, a linker and/or NLS, and a KRAB domain set forth in SEQ ID NO:590. In some embodiments, the fusion protein of a DNA-targeting system, or a DNA-targeting module thereof, comprises, from N- to C-terminal order: NLS and/or a linker, dSpCas9 set forth in SEQ ID NO:599, a linker and/or NLS, and a KRAB domain set forth in SEQ ID NO:669.

[0406] In some embodiments, a fusion protein provided herein comprises NLS2-dSpCas9-NLS-KRAB-NLS2. In some embodiments, a fusion protein provided herein comprises the sequence set forth in SEQ ID NO: 595, or an amino acid sequence that has at least 90%, 91%, 92%, 93%, 94%, 95%, 96%, 97%, 98%, or 99% sequence identity thereto. In some embodiments, the fusion protein comprises the sequence set forth in SEQ ID NO:595.

[0407] In some embodiments, a fusion protein of a DNA-targeting system, or a DNA-targeting module thereof, provided herein comprises a DNA-binding domain, a DNMT3A domain and a DNMT3L domain. In some embodiments, the effector domains is a fusion domain of DNMT3A and DNMT3L (DNMT3A/L domain). In some embodiments, the DNA-binding domain is a catalytically inactive Cas enzyme (dCas). In some embodiments, the Cas is a dCas9, such as a dSaCas9 or a dSpCas9. In some embodiments, the DNA-binding domain is dSpCas9. In some embodiments, the DNA-binding domain is a dSpCas9 set forth in SEQ ID NO:599. In some embodiments, a linker or NLS connects one of the DNMT3A domain or the DNMT3L domain with the DNA-binding domain. In some embodiments, the DNA binding domain is a Cas, and a linker or NLS can be present between the Cas and one or both of the DNMT3A domain and DNMT3L domain. In some embodiments, a fusion protein contains a DNA-binding domain, a DNMT3A domain and a DNMT3L domain, in any order. In some embodiments, a linker connects a DNMT3A domain with a DNMT3L domain. In some embodiments, the DNMT3A domain an DNMT3B domain are connected as a fusion domain. In some embodiments, the fusion domain is the DNMT3A/L domain set forth in SEQ ID NO: 651.

[0408] In some embodiments, the DNA-targeting system or fusion protein comprises, from N- to C-terminal order: NLS and/or a linker, dSpCas9 set forth in SEQ ID NO:599, a linker and/or NLS, and a DNMT3A/L domain set forth in SEQ ID NO: 651. In some embodiments, the DNA-targeting system or fusion protein comprises, from N- to C-terminal order: NLS and/or a linker, dSpCas9 set forth in SEQ ID NO:599, a linker and/or NLS, and a DNMT3A/L domain set forth in SEQ ID NO:651, and a linker and/or NLS.

[0409] In some embodiments, a fusion protein of a DNA-targeting system, or a DNA-targeting module thereof, provided herein comprises a DNA-binding domain, and two effector domains in which one is a KRAB domain and the other is a DNMT3A domain and a DNMT3L domain. In some embodiments, the effector domain composed of the DNMT3A domain and the DNMT3L domain is a fusion domain of DNMT3A and DNMT3L (DNMT3A/L domain). In some embodiments, the DNA-binding domain is a catalytically inactive Cas enzyme (dCas). In some embodiments, the Cas is a dCas9, such as a dSaCas9 or a dSpCas9. In some embodiments, the DNA-binding domain is dSpCas9. In some embodiments, each of the KRAB domain, the DNMT3A domain and the DNMT3L domain are N-terminal to the DNA-binding domain. In some embodiments, each of the KRAB domain, the DNMT3A domain and the DNMT3L domain are C-terminal to the DNA-binding domain. In some embodiments, the DNA-binding domain is between the KRAB domain and one of the DNMT3A or DNMT3L domains. In some embodiments, the fusion domain is the DNMT3A/L domain set forth in SEQ ID NO: 651. In some embodiments, the KRAB domain is set forth in SEQ ID NO:590. In some embodiments, the KRAB domain is set forth in SEQ ID NO:669. In some embodiments, the DNA-binding domain is a dSpCas9 set forth in SEQ ID NO:599. In some embodiments, the fusion protein may include one or more linker or NLS, such as at the N- or C-terminus of the fusion protein or between the Cas and the KRAB domain or DNMT3A/L domain. The linker or NLS can be any as described herein. In some embodiments, a linker or NLS can be present between the DNMT3A/L domain and the Cas. In some embodiments, a linker or NLS can be present between the Cas and the KRAB domain.

[0410] In some embodiments, the fusion protein contains the DNA-binding domain, and the KRAB domain and DNMT3A/3L fusion domain as first and second effector domains. In some embodiments, a first effector domain is fused to the N-terminus of the second effector domain and the second effector domain is fused to the N-terminus of the DNA-binding domain. In some embodiments, a fusion protein provided herein comprises in order: DNMT3A/L-KRAB-dSpCas9. In some embodiments, a fusion protein provided herein comprises in order: KRAB-DNMT3A/L-dSpCas9. In some embodiments, each of the KRAB domain and DNMT3A/3L domain are C-terminal to the DNA-binding domain in which a first effector domain is fused to the C-terminus of the DNA-binding domain and the second effector domain is fused to the C-terminus of the first effector domain. In some embodiments, a fusion protein provided herein comprises in order: dSpCas9-DNMT3A/L-KRAB. In some embodiments, a fusion protein provided herein comprises in order: dSpCas9-KRAB-DNMT3A/L. In some embodiments, the DNA-binding domain is between the KRAB domain and DNMT3A/3L domain, in which one effector domain is fused to the N-terminus of the DNA-binding domain and the other effector domain is fused to the C-terminus of the DNA-binding domain. In some embodiments, a fusion protein provided herein comprises in order: KRAB-dSpCas9-DNMT3A/L. In some embodiments, a fusion protein provided herein comprises in order: DNMT3A/L-dSpCas9-KRAB.

[0411] In some embodiments, the fusion protein of a DNA-targeting system, or a DNA-targeting module thereof, comprises, from N- to C-terminal order: a DNMT3A/L fusion domain set forth in SEQ ID NO: 651, an NLS and/or a linker, a dSpCas9 set forth in SEQ ID NO:599, a linker and/or NLS, and a KRAB domain set forth in SEQ ID NO:590. In some embodiments, the fusion protein of a DNA-targeting system, or a DNA-targeting module thereof, comprises, from N- to C-terminal order: a DNMT3A/L fusion domain set forth in SEQ ID NO: 651, an NLS and/or a linker, a dSpCas9 set forth in SEQ ID NO:599, a linker and/or NLS, and a KRAB domain set forth in SEQ ID NO:669.

[0412] In some embodiments, the DNA-targeting system or fusion protein comprises, from N- to C-terminal order: a DNMT3A/L fusion domain set forth in SEQ ID NO: 651, a first linker and/or NLS, a dSpCas9 set forth in SEQ ID NO:599, a second linker and/or NLS, and a KRAB domain set forth in SEQ ID NO: 590. In some embodiments, the DNA-targeting system or fusion protein comprises, from N- to C-terminal order: a DNMT3A/L fusion domain set forth in SEQ ID NO: 651, a first linker and/or NLS, a dSpCas9 set forth in SEQ ID NO:599, a second linker and/or NLS, and a KRAB domain set forth in SEQ ID NO: 669.

[0413] In some embodiments, the fusion protein of the DNA-targeting system, or a DNA-targeting module thereof, comprises the sequence set forth in SEQ ID NO:645, or an amino acid sequence that has at least 90%, 91%, 92%, 93%, 94%, 95%, 96%, 97%, 98%, or 99% sequence identity to SEQ ID NO:645. In some embodiments, the fusion protein comprises the sequence set forth in SEQ ID NO:645.

[0414] In some embodiments, the fusion protein of the DNA-targeting system, or a DNA-targeting module thereof, comprises the sequence set forth in SEQ ID NO: 647, or an amino acid sequence that has at least 90%, 91%, 92%, 93%, 94%, 95%, 96%, 97%, 98%, or 99% sequence identity thereto. In some embodiments, the fusion protein comprises the sequence set forth in SEQ ID NO:647.

[0415] In some embodiments, the fusion protein of the DNA-targeting system, or a DNA-targeting module thereof, comprises the sequence set forth in SEQ ID NO: 649, or an amino acid sequence that has at least 90%, 91%, 92%, 93%, 94%, 95%, 96%, 97%, 98%, or 99% sequence identity thereto. In some embodiments, the fusion protein comprises the sequence set forth in SEQ ID NO:649.

[0416] In some embodiments, the polynucleotide is an mRNA molecule that comprises a sequence encoding a DNMT3A/L-dCas9-KRAB fusion protein, such as the sequence set forth in SEQ ID NO:680, or a sequence having at least about 80%, 85%, 90%, 91%, 92%, 93%, 94%, 95%, 96%, 97%, 98%, 99%, or 100% sequence identity thereto. In some embodiments, the polynucleotide is set forth in SEQ ID NO:680.

[0417] In some aspects, exemplary linkers or NLS sequences can be any described herein. In some aspects, exemplary linkers or NLS sequences can be positioned in any order between the DNA-binding domain (e.g. dSpCas9) and one or more effector domains (e.g., KRAB and DNMT3A/L). In aspects of any of the above embodiments, the NLS can be any as described, such as set forth in Section E. In aspects of any of the above embodiments, the linker can be any as described, such as set forth in Section F.

[0418] 3. eZFP Fusion Proteins

[0419] In some aspects, the DNA-targeting system comprises an eZFP fusion protein, such as any provided herein. In some aspects, provided are DNA-targeting systems comprising eZFP fusion proteins.

[0420] In some aspects, the provided herein eZFP fusion proteins, are for targeting or capable of being targeted to an HBV gene or regulatory element thereof. In some embodiments, the fusion protein comprises an eZFP (i.e. the fusion protein is an eZFP fusion protein), such as any of the eZFPs described herein, for example in Section I-C. In some embodiments, the fusion protein further comprises an epigenetic effector domain, such as any of the effector domains for transcriptional repression described herein, for example in Section I-E. In some embodiments, the fusion protein comprises at least one epigenetic effector domain that decreases expression of an HBV gene or regulatory element thereof. In some embodiments, the fusion protein comprises more than one effector domain. In some embodiments, the fusion protein comprises one or more additional elements, such as a nuclear localization signal (NLS) or linker, such as any of the NLSs or linkers described herein. In some aspects, the elements of the fusion protein may be arranged in any suitable order within the fusion protein, such as an order from N-terminus to C-terminus. In some aspects, the fusion proteins comprising eZFPs provided herein may facilitate decreased expression of an HBV gene or regulatory element thereof, for example in connection with compositions and methods for treating a disease or disorder associated with HBV infection, liver disease, or cancer.

[0421] In some aspects, the fusion protein comprising the eZFP binds to, or is capable of binding to, (i.e. targets), any of the target sites provided herein. In some embodiments, the fusion protein binds to the target site. In some embodiments, the fusion protein comprising the eZFP binds to the target site that the eZFP binds to in the absence of the other elements of the fusion protein. Thus, in some embodiments, the eZFP of the fusion protein facilitates target-specific binding of the fusion protein. In some aspects, the fusion protein targets to the target site targeted by any of the eZFPs described herein, such as in Section I-C. In some embodiments, the fusion protein targets a target site in Table 7. In some embodiments, the fusion protein targets a target site in Table E4. In some embodiments, the fusion protein targets a target site comprising the nucleotide sequence set forth in any one of SEQ ID NOS: 1028-1055, a contiguous portion thereof of at least 12 nt, or a complementary sequence of any of the foregoing. In some embodiments, the target site comprises the nucleotide sequence set forth in any one of SEQ ID NOS: 1028-1055. In some embodiments, the target site comprises the nucleotide sequence set forth in any one of SEQ ID NOS: 1045, 1046 or 1052, a contiguous portion thereof of at least 12 nt, or a complementary sequence of any of the foregoing. In some embodiments, the target site comprises the nucleotide sequence set forth in any one of SEQ ID NOS: 1045, 1046 or 1052.

[0422] In some aspects, the fusion protein comprises any of the eZFPs set forth in Table E4. In some aspects, the fusion protein comprises an eZFP comprising the recognition regions F1-F6 set forth for any of the eZFPs set forth in Table E4 (comprising SEQ ID NOs: 720-725, respectively; SEQ ID NOs: 726-731, respectively; SEQ ID NOs:732-737, respectively; SEQ ID NOs:738-743, respectively; SEQ ID NOs:744-749, respectively; SEQ ID NOs:750-755, respectively; SEQ ID NOs:756-761, respectively; SEQ ID NOs:762-767, respectively; SEQ ID NOs:768-773, respectively; SEQ ID NOs:774-779, respectively; SEQ ID NOs:780-785, respectively; SEQ ID NOs:786-791, respectively; SEQ ID NOs:792-797, respectively; SEQ ID NOs:798-803, respectively; SEQ ID NOs:804-809, respectively; SEQ ID NOs:810-815, respectively; SEQ ID NOs:816-821, respectively; SEQ ID NOs:822-827, respectively; SEQ ID NOs:828-833, respectively; SEQ ID NOs:834-839, respectively; SEQ ID NOs:840-845, respectively; SEQ ID NOs:846-851, respectively; SEQ ID NOs:852-857, respectively; SEQ ID NOs:858-863, respectively; SEQ ID NOs: 864-869, respectively; SEQ ID NOs:870-875, respectively; SEQ ID NOs:876-881, respectively; or SEQ ID NOs:882-887, respectively). In some embodiments, the fusion protein comprises the amino acid sequence set forth in any one of SEQ ID NOS: 692-719, or a portion thereof, or an amino acid sequence that has at least 90%, 91%, 92%, 93%, 94%, 95%, 96%, 97%, 98%, or 99% sequence identity thereto. In some embodiments, the fusion protein comprises the amino acid sequence set forth in any one of SEQ ID NOS: 692-719. In some embodiments, the fusion protein comprises the amino acid sequence set forth in any one of SEQ ID NOS: 709, 710, 716, or a portion thereof, or an amino acid sequence that has at least 90%, 91%, 92%, 93%, 94%, 95%, 96%, 97%, 98%, or 99% sequence identity thereto. In some embodiments, the fusion protein comprises the amino acid sequence set forth in any one of SEQ ID NOS: 709, 710, or 716. In some embodiments, the eZFP of the fusion protein is encoded by the nucleotide sequence set forth in any one of SEQ ID NOS:888-915, or a nucleotide sequence that has at least 90%, 91%, 92%, 93%, 94%, 95%, 96%, 97%, 98%, or 99% sequence identity thereto. In some embodiments, the eZFP of the fusion protein is encoded by the nucleotide sequence set forth in any one of SEQ ID NOS:888-915. In some embodiments, the eZFP of the fusion protein is encoded by the nucleotide sequence set forth in any one of SEQ ID NOS:905, 906, 912, or a nucleotide sequence that has at least 90%, 91%, 92%, 93%, 94%, 95%, 96%, 97%, 98%, or 99% sequence identity thereto. In some embodiments, the eZFP of the fusion protein is encoded by the nucleotide sequence set forth in any one of SEQ ID NOS: 905, 906, or 912.

[0423] In some aspects, provided herein is a fusion protein comprising an eZFP, such as any of the eZPFs described herein, for example in Table E4. In some embodiments, the fusion protein targets a target site comprising the nucleotide sequence set forth in any one of SEQ ID NOS: 1028-1055, a contiguous portion thereof of at least 12 nt, or a complementary sequence of any of the foregoing. In some embodiments, the fusion protein targets a target site comprising the nucleotide sequence set forth in any one of SEQ ID NOS: 1028-1055. In some embodiments, the eZFP of the fusion protein comprises six zinc fingers denoted F1 through F6 in order from N-terminus to C-terminus, each comprising a corresponding zinc finger recognition region F1 through F6, and the amino acid sequences of the recognition regions F1-F6 comprise: SEQ ID NOs: 720-725, respectively; SEQ ID NOs: 726-731, respectively; SEQ ID NOs:732-737, respectively; SEQ ID NOs:738-743, respectively; SEQ ID NOs:744-749, respectively; SEQ ID NOs:750-755, respectively; SEQ ID NOs:756-761, respectively; SEQ ID NOs:762-767, respectively; SEQ ID NOs:768-773, respectively; SEQ ID NOs:774-779, respectively; SEQ ID NOs:780-785, respectively; SEQ ID NOs:786-791, respectively; SEQ ID NOs:792-797, respectively; SEQ ID NOs:798-803, respectively; SEQ ID NOs:804-809, respectively; SEQ ID NOs:810-815, respectively; SEQ ID NOs:816-821, respectively; SEQ ID NOs:822-827, respectively; SEQ ID NOs:828-833, respectively; SEQ ID NOs:834-839, respectively; SEQ ID NOs:840-845, respectively; SEQ ID NOs:846-851, respectively; SEQ ID NOs:852-857, respectively; SEQ ID NOs:858-863, respectively; SEQ ID NOs: 864-869, respectively; SEQ ID NOs:870-875, respectively; SEQ ID NOs:876-881, respectively; or SEQ ID NOs:882-887, respectively.

[0424] In some embodiments, the eZFP of the fusion protein comprises six zinc fingers denoted F1 through F6 in order from N-terminus to C-terminus, each comprising a corresponding zinc finger recognition region F1 through F6, and the amino acid sequences of the recognition regions F1-F6 comprise: F1:QSAHRKN(SEQ ID NO:822) F2:TSSNRKT(SEQ ID NO:823) F3:RSDNLSA(SEQ ID NO:824) F4:RNNDRKT(SEQ ID NO:825) F5:TSGSLSR(SEQ ID NO:826) F6:QAGHLAK(SEQ ID NO:827), respectively.

[0425] In some aspects, provided herein is a fusion protein comprising an eZFP, such as any of the eZPFs described herein, for example in Table E5. In some embodiments, the fusion protein comprises the amino acid sequence set forth in SEQ ID NOS:944-971, or a portion thereof, or an amino acid sequence that has at least 90%, 91%, 92%, 93%, 94%, 95%, 96%, 97%, 98%, or 99% sequence identity thereto. In some embodiments, the fusion protein comprises the amino acid sequence set forth in SEQ ID NO: 944-971. In some embodiments, the fusion protein is encoded by the nucleotide sequence set forth in SEQ ID NOS: 916-943, or a nucleotide sequence that has at least 90%, 91%, 92%, 93%, 94%, 95%, 96%, 97%, 98%, or 99% sequence identity thereto. In some embodiments, the fusion protein is encoded by the nucleotide sequence set forth in SEQ ID NO: 916-943.

[0426] In some aspects, provided herein is a fusion protein comprising an eZFP, such as any of the eZPFs described herein, for example in Table E5. In some embodiments, the fusion protein comprises the amino acid sequence set forth in SEQ ID NOS:961, 962, 968, or a portion thereof, or an amino acid sequence that has at least 90%, 91%, 92%, 93%, 94%, 95%, 96%, 97%, 98%, or 99% sequence identity thereto. In some embodiments, the fusion protein comprises the amino acid sequence set forth in SEQ ID NO: 961, 962, 968. In some embodiments, the fusion protein is encoded by the nucleotide sequence set forth in SEQ ID NOS: 933, 934, 940, or a nucleotide sequence that has at least 90%, 91%, 92%, 93%, 94%, 95%, 96%, 97%, 98%, or 99% sequence identity thereto. In some embodiments, the fusion protein is encoded by the nucleotide sequence set forth in SEQ ID NO: 933, 934, 940.

[0427] In some aspects, provided herein is a fusion protein comprising an eZFP, such as any of the eZPFs described herein, for example in Table E6. In some embodiments, the fusion protein comprises the amino acid sequence set forth in SEQ ID NOS:1000-1027, or a portion thereof, or an amino acid sequence that has at least 90%, 91%, 92%, 93%, 94%, 95%, 96%, 97%, 98%, or 99% sequence identity thereto. In some embodiments, the fusion protein comprises the amino acid sequence set forth in SEQ ID NO: 1000-1027. In some embodiments, the fusion protein is encoded by the nucleotide sequence set forth in SEQ ID NOS: 972-999, or a nucleotide sequence that has at least 90%, 91%, 92%, 93%, 94%, 95%, 96%, 97%, 98%, or 99% sequence identity thereto. In some embodiments, the fusion protein is encoded by the nucleotide sequence set forth in SEQ ID NO: 916-943.

[0428] In some aspects, provided herein is a fusion protein comprising an eZFP, such as any of the eZPFs described herein, for example in Table E6. In some embodiments, the fusion protein comprises the amino acid sequence set forth in SEQ ID NOS:1017, 1018, 1024, or a portion thereof, or an amino acid sequence that has at least 90%, 91%, 92%, 93%, 94%, 95%, 96%, 97%, 98%, or 99% sequence identity thereto. In some embodiments, the fusion protein comprises the amino acid sequence set forth in SEQ ID NO: 1017, 1018, 1024. In some embodiments, the fusion protein is encoded by the nucleotide sequence set forth in SEQ ID NOS: 989, 990, 996, or a nucleotide sequence that has at least 90%, 91%, 92%, 93%, 94%, 95%, 96%, 97%, 98%, or 99% sequence identity thereto. In some embodiments, the fusion protein is encoded by the nucleotide sequence set forth in SEQ ID NO: 989, 990, 996.

[0429] In some embodiments, the eZFP of the fusion protein comprises six zinc fingers denoted F1 through F6 in order from N-terminus to C-terminus, each comprising a corresponding zinc finger recognition region F1 through F6, and the amino acid sequences of the recognition regions F1-F6 comprise: F1:RSDHLSQ(SEQ ID NO:828) F2:ASSTRTK(SEQ ID NO:829) F3:RSDDLTR(SEQ ID NO:830) F4:QKSNLSS(SEQ ID NO:831) F5:QSANRTT(SEQ ID NO:832) F6:QNATRTK(SEQ ID NO:833), respectively.

[0430] In some embodiments, the eZFP of the fusion protein comprises six zinc fingers denoted F1 through F6 in order from N-terminus to C-terminus, each comprising a corresponding zinc finger recognition region F1 through F6, and the amino acid sequences of the recognition regions F1-F6 comprise: F1:QSSSLVR(SEQ ID NO:864) F2:QSGDLRR(SEQ ID NO:865) F3:RSDERKR(SEQ ID NO:866) F4:HRTTLTN(SEQ ID NO:867) F5:RSDHLTN(SEQ ID NO:868)F6:TSGELVR(SEQ ID NO:869), respectively.

[0431] In some embodiments, provided herein is a fusion protein comprising an eZFP, such as eZFP_18 as described herein. In some embodiments, the fusion protein targets a target site comprising the nucleotide sequence set forth in SEQ ID NO:1045, a contiguous portion thereof of at least 12 nt, or a complementary sequence of any of the foregoing. In some embodiments, the fusion protein targets a target site comprising the nucleotide sequence set forth in SEQ ID NO:1045. In some embodiments, the fusion protein comprises six zinc fingers denoted F1 through F6 in order from N-terminus to C-terminus, each comprising a corresponding zinc finger recognition region F1 through F6, and the amino acid sequence of each zinc finger recognition region is as follows: F1:QSAHRKN(SEQ ID NO:822) F2:TSSNRKT(SEQ ID NO:823) F3:RSDNLSA(SEQ ID NO:824) F4:RNNDRKT(SEQ ID NO:825) F5:TSGSLSR(SEQ ID NO:826) F6:QAGHLAK(SEQ ID NO:827). In some embodiments, the fusion protein comprises the amino acid sequence set forth in SEQ ID NO:709, or a portion thereof, or an amino acid sequence that has at least 90%, 91%, 92%, 93%, 94%, 95%, 96%, 97%, 98%, or 99% sequence identity thereto. In some embodiments, the fusion protein comprises the amino acid sequence set forth in SEQ ID NO:709. In some embodiments, the fusion protein is encoded by the nucleotide sequence set forth in SEQ ID NO:905, or a nucleotide sequence that has at least 90%, 91%, 92%, 93%, 94%, 95%, 96%, 97%, 98%, or 99% sequence identity thereto. In some embodiments, the fusion protein is encoded by the nucleotide sequence set forth in SEQ ID NO:905.

[0432] In some embodiments, provided herein is a fusion protein comprising an eZFP, such as eZFP_19 as described herein. In some embodiments, the fusion protein targets a target site comprising the nucleotide sequence set forth in SEQ ID NO:1046 a contiguous portion thereof of at least 12 nt, or a complementary sequence of any of the foregoing. In some embodiments, the fusion protein targets a target site comprising the nucleotide sequence set forth in SEQ ID NO:1046. In some embodiments, the fusion protein comprises six zinc fingers denoted F1 through F6 in order from N-terminus to C-terminus, each comprising a corresponding zinc finger recognition region F1 through F6, and the amino acid sequence of each zinc finger recognition region is as follows: F1:RSDHLSQ(SEQ ID NO:828) F2:ASSTRTK(SEQ ID NO:829) F3:RSDDLTR(SEQ ID NO:830) F4:QKSNLSS(SEQ ID NO:831) F5:QSANRTT(SEQ ID NO:832) F6:QNATRTK(SEQ ID NO:833). In some embodiments, the fusion protein comprises the amino acid sequence set forth in SEQ ID NO:710, or a portion thereof, or an amino acid sequence that has at least 90%, 91%, 92%, 93%, 94%, 95%, 96%, 97%, 98%, or 99% sequence identity thereto. In some embodiments, the fusion protein comprises the amino acid sequence set forth in SEQ ID NO:710. In some embodiments, the fusion protein is encoded by the nucleotide sequence set forth in SEQ ID NO:906, or a nucleotide sequence that has at least 90%, 91%, 92%, 93%, 94%, 95%, 96%, 97%, 98%, or 99% sequence identity thereto. In some embodiments, the fusion protein is encoded by the nucleotide sequence set forth in SEQ ID NO:906.

[0433] In some embodiments, provided herein is a fusion protein comprising an eZFP, such as eZFP_25 as described herein. In some embodiments, the fusion protein targets a target site comprising the nucleotide sequence set forth in SEQ ID NO:1052, a contiguous portion thereof of at least 12 nt, or a complementary sequence of any of the foregoing. In some embodiments, the fusion protein targets a target site comprising the nucleotide sequence set forth in SEQ ID NO:1052. In some embodiments, the fusion protein comprises six zinc fingers denoted F1 through F6 in order from N-terminus to C-terminus, each comprising a corresponding zinc finger recognition region F1 through F6, and the amino acid sequence of each zinc finger recognition region is as follows: F1:QSSSLVR(SEQ ID NO:864) F2:QSGDLRR(SEQ ID NO:865) F3:RSDERKR(SEQ ID NO:866) F4:HRTTLTN(SEQ ID NO:867) F5:RSDHLTN(SEQ ID NO:868) F6:TSGELVR(SEQ ID NO:869). In some embodiments, the fusion protein comprises the amino acid sequence set forth in SEQ ID NO:716, or a portion thereof, or an amino acid sequence that has at least 90%, 91%, 92%, 93%, 94%, 95%, 96%, 97%, 98%, or 99% sequence identity thereto. In some embodiments, the fusion protein comprises the amino acid sequence set forth in SEQ ID NO:716. In some embodiments, the fusion protein is encoded by the nucleotide sequence set forth in SEQ ID NO:912, or a nucleotide sequence that has at least 90%, 91%, 92%, 93%, 94%, 95%, 96%, 97%, 98%, or 99% sequence identity thereto. In some embodiments, the fusion protein is encoded by the nucleotide sequence set forth in SEQ ID NO:912.

[0434] In some aspects, the fusion protein further comprises one or more nuclear localization signal (NLS), such as any suitable NLS, for example SV40 NLS (SEQ ID NO: 614) or any NLS described herein. In some aspects, an NLS may promote nuclear localization of the fusion protein.

### II. POLYNUCLEOTIDES AND VECTORS AND RELATED METHODS FOR DELIVERY

[0435] In some aspects, provided are polynucleotides encoding any of the DNA-targeting systems described herein or a portion or a component of any of the foregoing. In some aspects, the polynucleotides can encode any of the components of the epigenetic-modifying DNA-targeting system, and/or any nucleic acid or proteinaceous molecule necessary to carry out aspects of the methods of the disclosure. In particular embodiments, provided are polynucleotides encoding any of the fusion proteins described herein, and/or any of the gRNAs described herein.

[0436] In some embodiments, provided are polynucleotides comprising the gRNAs described herein. In some embodiments, the gRNA is transcribed from a genetic construct (i.e. vector or plasmid) in the target cell. In some embodiments, the gRNA is produced by in vitro transcription and delivered to the target cell. In some embodiments, the gRNA comprises one or more modified nucleotides for increased stability. In some embodiments, the gRNA is delivered to the target cell pre-complexed as a RNP with the fusion protein.

[0437] In some embodiments, the polynucleotide is RNA or DNA. In some embodiments, the polynucleotide, such as a polynucleotide encoding a provided fusion protein, is mRNA. In some embodiments, the gRNA is provided as RNA and a polynucleotide encoding the fusion protein is mRNA. The mRNA can be 5′ capped and/or 3′ polyadenylated. In another embodiment, a polynucleotide provided herein, such as a polynucleotide encoding a provided fusion protein, is DNA. The DNA can be present in a vector.

[0438] In some embodiments, the polynucleotide is an mRNA molecule that comprises a sequence encoding a DNMT3A/L-dCas9-KRAB fusion protein, such as the sequence set forth in SEQ ID NO:680, or a sequence having at least about 80%, 85%, 90%, 91%, 92%, 93%, 94%, 95%, 96%, 97%, 98%, 99%, or 100% sequence identity thereto. In some embodiments, the polynucleotide is set forth in SEQ ID NO:680.

[0439] In some embodiments, a provided polynucleotide encodes a fusion protein as described herein that includes (a) a DNA-binding domain for targeting to a target site in a Hepatitis B viral DNA sequence, such as a gene or regulatory element thereof, for example any as described herein; and (b) at least one effector domain capable of reducing transcription of the gene. In some embodiments, the at least one effector domain is a transcriptional repressor effector domain. In some embodiments, the fusion protein includes a fusion protein of a Cas protein or variant thereof and at least one transcriptional repressor effector domain capable of reducing transcription of a gene. In some embodiments, the Cas is a dCas, such as dCas9. In some embodiments, the dCas9 is a dSpCas9, such as polynucleotide encoding a dSpCas9 set forth in SEQ ID NO: 599. Examples of such domains and fusion proteins include any as described in Section I.

[0440] In some embodiments, all of the components of the DNA-targeting systems provided herein are encoded in one polynucleotide. In some embodiments, the polynucleotide encodes a fusion protein comprising a Cas DNA-targeting domain and an effector domain, and also encodes a gRNA that targets to a target site of a HepB viral sequence, such as a gene or a regulatory element thereof.

[0441] In some embodiments, all of the components of a multiplex DNA-targeting system provided herein are encoded in one polynucleotide. In some aspects, a multiplex DNA-targeting system includes at least a first DNA-targeting module and a second DNA-targeting module, in which the first DNA-targeting module and the second DNA-targeting module are encoded in one polynucleotide, such as a first polynucleotide. In some embodiments, the first DNA-targeting module and the second DNA-targeting module are encoded in one polynucleotide, such as a first polynucleotide. In some embodiments, all of the components of a multiplexed DNA-targeting systems provided herein are encoded in multiple individual polynucleotides, such as a first polynucleotide and a second polynucleotide.

[0442] In some embodiments, the modules of a multiplex DNA-targeting system include a Cas DNA-binding domain, in which the first DNA-targeting module contains a first Cas protein and the second DNA-targeting module contains a second Cas protein, whereby the first Cas protein and the second Cas protein are encoded in a first polynucleotide. In some such embodiments, the first gRNA of the first DNA-targeting module and the second gRNA of the second DNA-targeting module are encoded in the first polynucleotide. In some such embodiments, the first gRNA of the first DNA-targeting module and the second gRNA of the second DNA-targeting module are encoded in a second polynucleotide.

[0443] In some embodiments, the modules of a multiplex DNA-targeting system include a Cas DNA-binding domain, in which the first DNA-targeting module contains a first Cas protein and the second DNA-targeting module contains a second Cas protein, whereby the first Cas protein and the second Cas protein are encoded by separate polynucleotides, such as in a first polynucleotide and a second polynucleotide. In some such embodiments, the first gRNA of the first DNA-targeting module is encoded in the first polynucleotide and the second gRNA of the second DNA-targeting module is encoded in the second polynucleotide. In some embodiments, the first Cas protein and the first gRNA are encoded in a first polynucleotide, and the second Cas protein and the second gRNA are encoded in a second polynucleotide.

[0444] In some embodiments, the modules of a multiplex DNA-targeting system each include a Cas DNA-binding domain, in which the Cas protein of the first DNA-targeting module and the second DNA-targeting module is the same and encoded by the same nucleotide sequence. In some embodiments, the Cas protein, the first gRNA, and the second gRNA are encoded in a first polynucleotide.

[0445] In some embodiments, the multiplex DNA-targeting system may contain a third DNA-binding module. In some embodiments, the components of the third DNA-binding module are encoded by the first polynucleotide, the second polynucleotide, or are encoded by a third polynucleotide.

[0446] In some embodiments, the polynucleotide encoding a DNA-binding domain of a DNA-targeting system or of a module of a multiplex DNA-targeting system comprises a sequence encoding a dCas9-KRAB fusion protein. In some embodiments, the polynucleotide encoding dSpCas9-KRAB fusion protein comprises the sequence set forth in SEQ ID NO:594, or a sequence having at least about 80%, 85%, 90%, 91%, 92%, 93%, 94%, 95%, 96%, 97%, 98%, 99%, or 100% sequence identity thereto. In some embodiments, the polynucleotide encoding dCas9-KRAB fusion protein is set forth in SEQ ID NO: 594. In some embodiments, the polynucleotide encodes a dSpCas9-KRAB fusion protein that has an amino acid sequence comprising SEQ ID NO: 595, or a sequence having at least about 80%, 85%, 90%, 91%, 92%, 93%, 94%, 95%, 96%, 97%, 98%, 99%, or 100% sequence identity thereto. In some embodiments, the polynucleotide encodes a dCas9-KRAB fusion protein that has the amino acid sequence set forth in SEQ ID NO: 595. In some embodiments, the polynucleotide is RNA or DNA. In some embodiments, the polynucleotide, such as a polynucleotide encoding a provided fusion protein, is mRNA. The mRNA can be 5′ capped and/or 3′ polyadenylated. In another embodiment, a polynucleotide provided herein, such as a polynucleotide encoding a provided fusion protein, is DNA. The DNA can be present in a vector.

[0447] In some embodiments, the polynucleotide encoding a DNA-binding domain of a DNA-targeting system or of a module of a multiplex DNA-targeting system comprises a sequence encoding a DNMT3A/L-dCas9-KRAB fusion protein. In some embodiments, the polynucleotide encoding DNMT3A/L-dCas9-KRAB fusion protein comprises the sequence set forth in SEQ ID NO:644, or a sequence having at least about 80%, 85%, 90%, 91%, 92%, 93%, 94%, 95%, 96%, 97%, 98%, 99%, or 100% sequence identity thereto. In some embodiments, the polynucleotide encoding DNMT3A/L-dCas9-KRAB fusion protein is set forth in SEQ ID NO: 644. In some embodiments, the polynucleotide encodes a DNMT3A/L-dCas9-KRAB fusion protein that has an amino acid sequence comprising SEQ ID NO: 645, or a sequence having at least about 80%, 85%, 90%, 91%, 92%, 93%, 94%, 95%, 96%, 97%, 98%, 99%, or 100% sequence identity thereto. In some embodiments, the polynucleotide encodes a DNMT3A/L-dCas9-KRAB fusion protein that has the amino acid sequence set forth in SEQ ID NO: 645. In some embodiments, the polynucleotide is RNA or DNA. In some embodiments, the polynucleotide, such as a polynucleotide encoding a provided fusion protein, is mRNA. The mRNA can be 5′ capped and/or 3′ polyadenylated. In another embodiment, a polynucleotide provided herein, such as a polynucleotide encoding a provided fusion protein, is DNA. The DNA can be present in a vector.

[0448] In some embodiments, the polynucleotide comprises a sequence encoding a DNMT3A/L-dCas9-KRAB fusion protein. In some embodiments, the polynucleotide encoding a DNMT3A/L-dCas9-KRAB fusion protein comprises the sequence set forth in SEQ ID NO:646, or a sequence having at least about 80%, 85%, 90%, 91%, 92%, 93%, 94%, 95%, 96%, 97%, 98%, 99%, or 100% sequence identity thereto. In some embodiments, the polynucleotide encoding a DNMT3A/L-dCas9-KRAB fusion protein is set forth in SEQ ID NO: 646. In some embodiments, the polynucleotide encodes a DNMT3A/L-dCas9-KRAB fusion protein that has an amino acid sequence comprising SEQ ID NO: 647, or a sequence having at least about 80%, 85%, 90%, 91%, 92%, 93%, 94%, 95%, 96%, 97%, 98%, 99%, or 100% sequence identity thereto. In some embodiments, the polynucleotide encodes a DNMT3A/L-dCas9-KRAB fusion protein that has the amino acid sequence set forth in SEQ ID NO: 647. In some embodiments, the polynucleotide is RNA or DNA. In some embodiments, the polynucleotide, such as a polynucleotide encoding a provided fusion protein, is mRNA. The mRNA can be 5′ capped and/or 3′ polyadenylated. In another embodiment, a polynucleotide provided herein, such as a polynucleotide encoding a provided fusion protein, is DNA. The DNA can be present in a vector.

[0449] In some embodiments, the polynucleotide comprises a sequence encoding a DNMT3A/L-dCas9-KRAB fusion protein. In some embodiments, the polynucleotide encoding a DNMT3A/L-dCas9-KRAB fusion protein comprises the sequence set forth in SEQ ID NO:648, or a sequence having at least about 80%, 85%, 90%, 91%, 92%, 93%, 94%, 95%, 96%, 97%, 98%, 99%, or 100% sequence identity thereto. In some embodiments, the polynucleotide encoding a DNMT3A/L-dCas9-KRAB fusion protein is set forth in SEQ ID NO: 648. In some embodiments, the polynucleotide encodes a DNMT3A/L-dCas9-KRAB-DNMT3A/L fusion protein that has an amino acid sequence comprising SEQ ID NO: 649, or a sequence having at least about 80%, 85%, 90%, 91%, 92%, 93%, 94%, 95%, 96%, 97%, 98%, 99%, or 100% sequence identity thereto. In some embodiments, the polynucleotide encodes a DNMT3A/L-dCas9-KRAB fusion protein that has the amino acid sequence set forth in SEQ ID NO: 649. In some embodiments, the polynucleotide is RNA or DNA. In some embodiments, the polynucleotide, such as a polynucleotide encoding a provided fusion protein, is mRNA. The mRNA can be 5′ capped and/or 3′ polyadenylated. In another embodiment, a polynucleotide provided herein, such as a polynucleotide encoding a provided fusion protein, is DNA. The DNA can be present in a vector.

[0450] Also provided herein is a vector that contains any of the provided polynucleotides. In some embodiments, the vector comprises a genetic construct, such as a plasmid or an expression vector.

[0451] In some embodiments, the expression vector comprising the sequence encoding the fusion protein of a DNA-targeting system provided herein can further comprise a polynucleotide sequence encoding at least one gRNA. The sequence encoding the gRNA can be operably linked to at least one transcriptional control sequence for expression of the gRNA in the cell. For example, DNA encoding the gRNA can be operably linked to a promoter sequence that is recognized by RNA polymerase III (Pol III). Examples of suitable Pol III promoters include, but are not limited to, mammalian U6, U3, H1, and 7SL RNA promoters.

[0452] An expression vector (such as a DNA or RNA (e.g. mRNA) expression vector) can comprise any number of suitable transcriptional control sequences. For example, transcriptional control sequences may include enhancers, promoters, or untranslated regions (UTRs) such as 3′UTRs or 5′UTRs. In some embodiments, the UTRs are encoded by and/or present in the expression vector (e.g. a DNA vector). In some embodiments, mRNA encoding the fusion protein includes UTRs. In some aspects, different transcriptional control sequences may be selected for use in an expression vector, for example to achieve the appropriate level of expression. For example, in some embodiments, UTRs can be selected that facilitate expression in a specific tissue or cell type (e.g. liver or hepatocyte). In some embodiments, a 5′UTR of the expression vector encodes or comprises the sequence set forth in SEQ ID NO:681. In some embodiments, a 3′UTR of the expression vector encodes or comprises the sequence set forth in SEQ ID NO:682.

[0453] In some embodiments, provided is a vector containing a polynucleotide that encodes a fusion protein comprising a DNA-binding domain comprising a dCas and at least one effector domain capable of decreasing transcription of a gene and/or regulatory element thereof, and a polynucleotide or combination of polynucleotides encoding a gRNA, or combination of gRNAs, such as two gRNAs, or three gRNAs. In some embodiments, the dCas is a dCas9, such as dSpCas9. In some embodiments, the polynucleotide encodes a fusion protein that includes a dSpCas9 set forth in SEQ ID NO: 599. In some embodiments, the polynucleotide(s) encodes a gRNA or combination of gRNAs as described in Section I.B.ii. For example, the polynucleotide can encode a combination of gRNAs, each comprising a spacer sequence selected from any one of SEQ ID NOS:196-229, 230-295, or 296-390 or a contiguous portion thereof of at least 14 nt. In some embodiments the polynucleotide(s) encodes a combination of gRNAs that each comprise a sequence set forth in any one of SEQ ID NOS: 391-424, 425-490, or 491-585.

[0454] In some embodiments, the effector domain is KRAB. In some embodiments, the effector domain is DNMT3A/L. In some embodiments, the vector includes a polynucleotide that encodes the amino acid sequence comprising SEQ ID NO: 590, SEQ ID NO: 595, SEQ ID NO:645, SEQ ID NO:647, or SEQ ID NO:649, or a sequence having at least about 80%, 85%, 90%, 91%, 92%, 93%, 94%, 95%, 96%, 97%, 98%, 99%, or 100% sequence identity thereto, and a polynucleotide or polynucleotides that encode a gRNA or combination of gRNAs such as any described in Section I.B.ii. In some embodiments, the polynucleotide(s) encodes a combination of gRNAs, each comprising a spacer sequence selected from any one of SEQ ID NOS: 196-229, 230-295, or 296-390, or a contiguous portion thereof of at least 14 nt. In some embodiments, each gRNA further comprises the sequence set forth in SEQ ID NO: 587. In some embodiments the polynucleotide(s) encodes a combination of gRNAs that each comprises a sequence set forth in any one of SEQ ID NOS: 391-424, 425-490, or 491-585.

[0455] In some embodiments, the polynucleotide encodes the fusion protein and the at least one gRNA.

[0456] In some embodiments, the polynucleotide as provided herein can be codon optimized for efficient translation into protein in the eukaryotic cell or animal of interest. For example, codons can be optimized for expression in humans, mice, rats, hamsters, cows, pigs, cats, dogs, fish, amphibians, plants, yeast, insects, and so forth. Programs for codon optimization are available as freeware. Commercial codon optimization programs are also available.

[0457] In some embodiments, a polynucleotide described herein can comprise one or more transcription and/or translation control elements. Depending on the host/vector system utilized, any of a number of suitable transcription and translation control elements, including constitutive and inducible promoters, transcription enhancer elements, transcription terminators, etc. can be used in the expression vector.

[0458] Non-limiting examples of suitable eukaryotic promoters (i.e., promoters functional in a eukaryotic cell) include those from cytomegalovirus (CMV) immediate early, herpes simplex virus (HSV) thymidine kinase, early and late SV40, long terminal repeats (LTRs) from retrovirus, human elongation factor-1 promoter (EFI), a hybrid construct comprising the cytomegalovirus (CMV) enhancer fused to the chicken beta-actin promoter (CAG), murine stem cell virus promoter (MSCV), phosphoglycerate kinase-1 locus promoter (PGK), and mouse metallothionein-I.

[0459] For expressing small RNAs, including guide RNAs used in connection with the DNA-targeting systems, various promoters such as RNA polymerase III promoters, including for example U6 and H1, can be advantageous. Descriptions of and parameters for enhancing the use of such promoters are known in the art, and additional information and approaches are regularly being described; see, e.g., Ma, H. et al., Molecular Therapy-Nucleic Acids 3, e161 (2014) doi:10.1038/mtna.2014.12.

[0460] The expression vector can also contain a ribosome binding site for translation initiation and a transcription terminator. The expression vector can also comprise appropriate sequences for amplifying expression. The expression vector can also include nucleotide sequences encoding non-native tags (e.g., histidine tag, hemagglutinin tag, green fluorescent protein, etc.) that are fused to the site-directed polypeptide, thus resulting in a fusion protein.

[0461] A promoter can be an inducible promoter (e.g., a heat shock promoter, tetracycline-regulated promoter, steroid-regulated promoter, metal-regulated promoter, estrogen receptor-regulated promoter, etc.). The promoter can be a constitutive promoter (e.g., CMV promoter, UBC promoter). In some cases, the promoter can be a spatially restricted and/or temporally restricted promoter (e.g., a tissue specific promoter, a cell type specific promoter (e.g. a T cell specific promoter), etc.).

[0462] Expression vectors contemplated include, but are not limited to, viral vectors based on vaccinia virus, poliovirus, adenovirus, adeno-associated virus, SV40, herpes simplex virus, human immunodeficiency virus, retrovirus (e.g., Murine Leukemia Virus, spleen necrosis virus, and vectors derived from retroviruses such as Rous Sarcoma Virus, Harvey Sarcoma Virus, avian leukosis virus, a lentivirus, human immunodeficiency virus, myeloproliferative sarcoma virus, and mammary tumor virus) and other recombinant vectors. Other vectors contemplated for eukaryotic target cells include, but are not limited to, the vectors pXT1, pSG5, pSVK3, pBPV, pMSG, and pSVLSV40 (Pharmacia). Other vectors can be used so long as they are compatible with the host cell.

[0463] In some embodiments, the vector is a viral vector, such as an adeno-associated virus (AAV) vector, a retroviral vector, a lentiviral vector, or a gammaretroviral vector. In some embodiments. In some embodiments, the viral vector is an adeno-associated virus (AAV) vector. In some embodiments, the AAV vector is selected from among an AAV1, AAV2, AAV3, AAV4, AAV5, AAV6, AAV7, AAV8, or AAV9 vector. In some embodiments, the vector is a lentiviral vector. In some embodiments, the vector is a non-viral vector, for example a lipid nanoparticle, a liposome, an exosome, or a cell penetrating peptide. In some embodiments, the vector comprises one vector, or two or more vectors.

[0464] In some embodiments, a vector described herein is or comprises a lipid nanoparticle (LNP). In some embodiments, any of the epigenetic-modifying DNA-targeting systems, gRNAs, Cas-gRNA combinations, polynucleotides, fusion proteins, or components thereof described herein, are incorporated in lipid nanoparticles (LNPs), such as for delivery. In some embodiments, the lipid nanoparticle is a vector for delivery. In some embodiments, the nanoparticle may comprise at least one lipid. The lipid may be selected from, but is not limited to, DLin-DMA, DLin-K-DMA, 98N12-5, C12-200, DLin-MC3-DMA, DLin-KC2-DMA, DODMA, PLGA, PEG, PEG-DMG and PEGylated lipids. In another aspect, the lipid may be a cationic lipid such as, but not limited to, DLin-DMA, DLin-D-DMA, DLin-MC 3-DMA, DLin-KC2-DMA and DODMA.

[0465] Lipid nanoparticles can be used for the delivery of encapsulated or associated (e.g., complexed) therapeutic agents, including nucleic acids and proteins, such as those encoding and/or comprising CRISPR/Cas systems. See, e.g., U.S. Pat. Nos. 10,723,692, 10,941,395, and WO 2015/035136.

[0466] In some embodiments, the provided methods involve use of a lipid nanoparticle (LNP) comprising mRNA, such as mRNA encoding a protein component of any of the provided DNA-targeting systems, for example any of the fusion proteins provided herein. In some embodiments, the mRNA can be produced using methods known in the art such as in vitro transcription. In some embodiments of the method, the mRNA comprises a 5′ cap. In some embodiments, the 5′ cap is an altered nucleotide on the 5′ end of primary transcripts such as messenger RNA. In some aspects, the 5′ caps of the mRNA improves one or more of RNA stability and processing, mRNA metabolism, the processing and maturation of an RNA transcript in the nucleus, transport of mRNA from the nucleus to the cytoplasm, mRNA stability, and efficient translation of mRNA to protein. In some embodiments, a 5′ cap can be a naturally-occurring 5′ cap or one that differs from a naturally-occurring cap of an mRNA. A 5′ cap may be any 5′ cap known to a skilled artisan. In certain embodiments, the 5′ cap is selected from the group consisting of an Anti-Reverse Cap Analog (ARCA) cap, a 7-methyl-guanosine (7mG) cap, a CleanCap® analog, a vaccinia cap, and analogs thereof. For instance, the 5′ cap may include, without limitation, an anti-reverse cap analogs (ARCA) (U.S. Pat. No. 7,074,596), 7-methyl-guanosine, CleanCap® analogs, such as Cap 1 analogs (Trilink; San Diego, CA), or enzymatically capped using, for example, a vaccinia capping enzyme or the like. In some embodiments, the mRNA may be polyadenylated. The mRNA may contain various 5′ and 3′ untranslated sequence elements to enhance expression of the encoded protein and/or stability of the mRNA itself. Such elements can include, for example, posttranslational regulatory elements such as a woodchuck hepatitis virus post-transcriptional regulatory element (WPRE). In some embodiments, the mRNA comprises at least one nucleoside modification. The mRNA may contain modifications of naturally-occurring nucleosides to nucleoside analogs. Any nucleoside analogs known in the art are envisioned. Such nucleoside analogs can include, for example, those described in U.S. Pat. No. 8,278,036. In certain embodiments of the method, the nucleoside modification is selected from the group consisting of a modification from uridine to pseudouridine and uridine to Nl-methyl pseudouridine. In particular embodiments of the method the nucleoside modification is from uridine to pseudouridine.

[0467] In some embodiments, the described LNP composition comprises a PEG-lipid (e.g., a lipid comprising a polyethylene glycol component). In some embodiments, the described LNP composition comprises two or more PEG-lipids. Exemplary PEG-lipids also include, but are not limited to, PEG-modified phosphatidylethanolamines, PEG-modified phosphatidic acids, PEG-modified ceramides, PEG-modified dialkylamines, PEG-modified diacylglycerols, PEG-modified dialkylglycerols, and mixtures thereof. For example, the one or more PEG-lipids can comprise PEG-c-DOMG, PEG-DMG, PEG-DLPE, PEG-DMPE, PEG-DPPC, a PEG-DSPE lipid, or a combination thereof. In some embodiments, PEG moiety is an optionally substituted linear or branched polymer of ethylene glycol or ethylene oxide. In some embodiments, the PEG moiety is substituted, e.g., by one or more alkyl, alkoxy, acyl, hydroxy, or aryl groups. In some embodiments, the PEG moiety includes PEG copolymer such as PEG-polyurethane or PEG-polypropylene (see, e.g., j. Milton Harris, Poly(ethylene glycol) chemistry: biotechnical and biomedical applications (1992)). In some embodiments, a PEG-lipid is a PEG-lipid conjugate. In some embodiments, the PEG-lipid comprises from about 0.1 mol % to about 6 mol % of a total lipid content present in said nanoparticle composition. In some embodiments, a number average molecular weight of the PEG-lipid is from about 200 Da to about 5000 Da. In some embodiments, the LNP is conjugated to N-Acetylgalactosamine (GalNAc), an amino sugar derivative of galactose. GalNAc is a sugar molecule that can recognize and bind to a cell surface protein, the asialoglycoprotein receptor (ASGPR). ASGPR is abundantly expressed on liver cells (hepatocytes). In some embodiments, GalNAc conjugation to LNPs (e.g., 0.15% molecular weight of GalNAc-PEG lipid) improves delivery of the LNP to the hepatocytes in mouse models (e.g., FRG mouse models). In some embodiments, GalNAc conjugation to LNPs can improve delivery to hepatocytes. In some embodiments, the lipid nanoparticle comprises GalNAC-conjugated lipids (e.g. a GalNAc-PEG lipid). In some embodiments, the molar percentage of lipids that are GalNAC-conjugated in a lipid nanoparticle is between about 0% and about 2%. In some embodiments, the molar percentage of lipids that are GalNAC-conjugated in a lipid nanoparticle is at or about 0.1%, at or about 0.2%, at or about 0.3%, at or about 0.4%, at or about 0.5%, at or about 0.6%, at or about 0.7%, at or about 0.8%, at or about 0.9%, at or about 1.0%, at or about 1.1%, at or about 1.2%, at or about 1.3%, at or about 1.4%, at or about 1.5%, at or about 1.6%, at or about 1.7%, at or about 1.8%, at or about 1.9%, at or about 2.0%, or more, or a value in between any of the foregoing.

[0468] In some embodiments, LNPs useful for in the present methods comprise a cationic lipid selected from DLin-DMA (1,2-dilinoleyloxy-3-dimethylaminopropane), DLin-MC3-DM A (dilinoleylmethyl-4-dimethylaminobutyrate), DLin-KC2-DMA (2,2-dilinoleyl-4-(2-dimethylaminoethyl)-[1,3]-dioxolane), DODMA (1,2-dioleyloxy-N,N-dimethyl-3-aminopropane), SS-OP (Bis[2-(4-{2-[4-(cis-9 octadecenoyloxy)phenylacetoxy]ethyl}piperidinyl)ethyl] disulfide), and derivatives thereof. DLin-MC3-DMA and derivatives thereof are described, for example, in WO 2010/144740. DODMA and derivatives thereof are described, for example, in U.S. Pat. No. 7,745,651 and Mok et al. (1999), Biochimica et Biophysica Acta, 1419(2): 137-150. DLin-DMA and derivatives thereof are described, for example, in U.S. Pat. No. 7,799,565. DLin-KC2-DMA and derivatives thereof are described, for example, in U.S. Pat. No. 9,139,554. SS-OP (NOF America Corporation, White Plains, NY) is described, for example, at www.nofamerica.com/store/index.php?dispatch=products.view&product_id=962. Additional and non-limiting examples of cationic lipids include methylpyridiyl-dialkyl acid (MPDACA), palmitoyl-oleoyl-nor-arginine (PONA), guanidino-dialkyl acid (GUADACA), 1,2-di-O-octadecenyl-3-trimethylammonium propane (DOTMA), 1,2-dioleoyl-3-trimethylammonium-propane (DOTAP), Bis{2-[N-methyl-N-(a-D-tocopherolhemisuccinatepropyl)amino]ethyl} disulfide (SS-33/3AP05), Bis{2-[4-(a-D-tocopherolhemisuccinateethyl)piperidyl] ethyl} disulfide (SS33/4PE15), Bis{2-[4-(cis-9-octadecenoateethyl)-1-piperidinyl] ethyl} disulfide (SS18/4PE16), and Bis{2-[4-(cis,cis-9,12-octadecadienoateethyl)-1-piperidinyl] ethyl} disulfide (SS18/4PE13). In further embodiments, the lipid nanoparticles also comprise one or more non-cationic lipids and a lipid conjugate.

[0469] In some embodiments, the molar concentration of the cationic lipid is from about 20% to about 80%, from about 30% to about 70%, from about 40% to about 60%, from about 45% to about 55%, or about 20%, about 25%, about 30%, about 35%, about 40%, about 45%, about 50%, about 55%, about 60%, about 65%, about 70%, about 75%, or about 80% of the total lipid molar concentration, wherein the total lipid molar concentration is the sum of the cationic lipid, the non-cationic lipid, and the lipid conjugate molar concentrations. In certain embodiments, the lipid nanoparticles comprise a molar ratio of cationic lipid to any of the polynucleotides of from about 1 to about 20, from about 2 to about 16, from about 4 to about 12, from about 6 to about 10, or about 1, about 2, about 3, about 4, about 5, about 6, about 7, about 8, about 9, about 10, about 11, about 12, about 13, about 14, about 15, about 16, about 17, about 18, about 19, or about 20.

[0470] In some embodiments, the lipid nanoparticles can comprise at least one non-cationic lipid. In particular embodiments, the molar concentration of the non-cationic lipids is from about 20% to about 80%, from about 30% to about 70%, from about 40% to about 70%, from about 40% to about 60%, from about 46% to about 50%, or about 20%, about 25%, about 30%, about 35%, about 40%, about 45%, about 48.5%, about 50%, about 55%, about 60%, about 65%, about 70%, about 75%, or about 80% of the total lipid molar concentration. Non-cationic lipids include, in some embodiments, phospholipids and steroids.

[0471] In some embodiments, phospholipids useful for the lipid nanoparticles described herein include, but are not limited to, 1,2-Distearoyl-sn-glycero-3-phosphocholine (DSPC), 1,2-Didecanoyl-sn-glycero-3-phosphocholine (DDPC), 1,2-Dierucoyl-sn-glycero-3-phosphate(Sodium Salt) (DEPA-NA), 1,2-Dierucoyl-sn-glycero-3-phosphocholine (DEPC), 1,2-Dierucoyl-sn-glycero-3-phosphoethanolamine (DEPE), 1,2-Dierucoyl-sn-glycero-3[Phospho-rac-(1-glycerol)(Sodium Salt) (DEPG-NA), 1,2-Dilinoleoyl-sn-glycero-3-phosphocholine (DLOPC), 1,2-Dilauroyl-sn-glycero-3-phosphate(Sodium Salt) (DLPA-NA), 1,2-Dilauroyl-sn-glycero-3-phosphocholine (DLPC), 1,2-Dilauroyl-sn-glycero-3-phosphoethanolamine (DLPE), 1,2-Dilauroyl-sn-glycero-3[Phospho-rac-(1-glycerol . . . )(Sodium Salt) (DLPG-NA), 1,2-Dilauroyl-sn-glycero-3[Phospho-rac-(1-glycerol)(Ammonium Salt) (DLPG-NH4), 1,2-Dilauroyl-sn-glycero-3-phosphoserine(Sodium Salt) (DLPS-NA), 1,2-Dimyristoyl-sn-glycero-3-phosphate(SodiumSalt) (DMPA-NA), 1,2-Dimyristoyl-sn-glycero-3-phosphocholine (DMPC), 1,2-Dimyristoyl-sn-glycero-3-phosphoethanolamine (DMPE), 1,2-Dimyristoyl-sn-glycero-3[Phospho-rac-(1-glycerol)(Sodium Salt) (DMPG-NA), 1,2-Dimyristoyl-sn-glycero-3[Phospho-rac-(1-glycerol)(Ammonium Salt) (DMPG-NH4), 1,2-Dimyristoyl-sn-glycero-3[Phospho-rac-(1-glycerol)(Sodium/Ammonium Salt) (DMPG-NH4/NA), 1,2-Dimyristoyl-sn-glycero-3-phosphoserine(Sodium Salt) (DMPS-NA), 1,2-Dioleoyl-sn-glycero-3-phosphate(Sodium Salt) (DOPA-NA), 1,2-Dioleoyl-sn-glycero-3-phosphocholine (DOPC), 1,2-Dioleoyl-sn-glycero-3-phosphoethanolamine (DOPE), 1,2-Dioleoyl-sn-glycero-3[Phospho-rac-(1-glycerol)(Sodium Salt) (DOPG-NA), 1,2-Dioleoyl-sn-glycero-3-phosphoserine(Sodium Salt) (DOPS-NA), 1,2-Dipalmitoyl-sn-glycero-3-phosphate(Sodium Salt) (DPPA-NA), 1,2-Dipalmitoyl-sn-glycero-3-phosphocholine (DPPC), 1,2-Dipalmitoyl-sn-glycero-3-phosphoethanolamine (DPPE), 1,2-Dipalmitoyl-sn-glycero-3[Phospho-rac-(1-glycerol)(Sodium Salt) (DPPG-NA), 1,2-Dipalmitoyl-sn-glycero-3[Phospho-rac-(1-glycerol)(Ammonium Salt) (DPPG-NH4), 1,2-Dipalmitoyl-sn-glycero-3-phosphoserine(Sodium Salt) (DPPS-NA), 1,2-Distearoyl-sn-glycero-3-phosphate(Sodium Salt) (DSPA-NA), 1,2-Distearoyl-sn-glycero-3-phosphoethanolamine (DSPE), 1,2-Distearoyl-sn-glycero-3[Phospho-rac-(1-glycerol)(Sodium Salt) (DSPG-NA), 1,2-Distearoyl-sn-glycero-3[Phospho-rac-(1-glycerol)(Ammonium Salt) (DSPG-NH4), 1,2-Distearoyl-sn-glycero-3-phosphoserine(Sodium Salt) (DSPS-NA), Egg-PC (EPC), Hydrogenated Egg PC (HEPC), Hydrogenated Soy PC (HSPC), 1-Myristoyl-sn-glycero-3-phosphocholine (LY S OPCM YRIS TIC), 1-Palmitoyl-sn-glycero-3-phosphocholine (LYSOPCPALMITIC), 1-Stearoyl-sn-glycero-3-phosphocholine (LYSOPC STEARIC), 1-Myristoyl-2-palmitoyl-sn-glycero3-phosphocholine (MPPC), 1-Myristoyl-2-stearoyl-sn-glycero-3-phosphocholine (MSPC), 1-Palmitoyl-2-myristoyl-sn-glycero-3-phosphocholine (PMPC), 1-Palmitoyl-2-oleoyl-sn-glycero-3-phosphocholine (POPC), 1-Palmitoyl-2-oleoyl-sn-glycero-3-phosphoethanolamine (POPE), 1-Palmitoyl-2-oleoyl-sn-glycero-3[Phospho-rac-(1-glycerol)] (Sodium Salt) (POPG-NA), 1-Palmitoyl-2-stearoyl-sn-glycero-3-phosphocholine (PS PC), 1-Stearoyl-2-myristoyl-sn-glycero-3-phosphocholine (SMPC), 1-Stearoyl-2-oleoyl-sn-glycero-3-phosphocholine (SOPC), and 1-Stearoyl-2-palmitoyl-sn-glycero-3-phosphocholine (SPPC). In particular embodiments, the phospholipid is DSPC. In particular embodiments, the phospholipid is DOPE. In particular embodiments, the phospholipid is DOPC.

[0472] In some embodiments, the non-cationic lipids comprised by the lipid nanoparticles include one or more steroids. Steroids useful for the lipid nanoparticles described herein include, but are not limited to, cholestanes such as cholesterol, cholanes such as cholic acid, pregnanes such as progesterone, androstanes such as testosterone, and estranes such as estradiol. Further steroids include, but are not limited to, cholesterol (ovine), cholesterol sulfate, desmosterol-d6, cholesterol-d7, lathosterol-d7, desmosterol, stigmasterol, lanosterol, dehydrocholesterol, dihydrolanosterol, zymosterol, lathosterol, zymosterol-d5, 14-demethyl-lanosterol, 14-demethyl-lanosterol-d6, 8(9)-dehydrocholesterol, 8(14)-dehydrocholesterol, diosgenin, DHEA sulfate, DHEA, lanosterol-d6, dihydrolanosterol-d7, campesterol-d6, sitosterol, lanosterol-95, Dihydro FF-MAS-d6, zymostenol-d7, zymostenol, sitostanol, campestanol, campesterol, 7-dehydrodesmosterol, pregnenolone, sitosterol-d7, Dihydro T-MAS, Delta 5-avenasterol, Brassicasterol, Dihydro FF-MAS, 24-methylene cholesterol, cholic acid derivatives, cholesteryl esters, and glycosylated sterols. In particular embodiments, the lipid nanoparticles comprise cholesterol.

[0473] In some embodiments, the lipid nanoparticles comprise a lipid conjugate. Such lipid conjugates include, but are not limited to, ceramide PEG derivatives such as C8 PEG2000 ceramide, C16 PEG2000 ceramide, C8 PEG5000 ceramide, C16 PEG5000 ceramide, C8 PEG750 ceramide, and C16 PEG750 ceramide, phosphoethanolamine PEG derivatives such as 16:0 PEG5000PE, 14:0 PEG5000 PE, 18:0 PEG5000 PE, 18:1 PEG5000 PE, 16:0 PEG3000 PE, 14:0 PEG3000 PE, 18:0 PEG3000 PE, 18:1 PEG3000 PE, 16:0 PEG2000 PE, 14:0 PEG2000 PE, 18:0 PEG2000 PE, 18:1 PEG2000 PE 16:0 PEG1000 PE, 14:0 PEG1000 PE, 18:0 PEG1000 PE, 18:1 PEG 1000 PE, 16:0 PEG750 PE, 14:0 PEG750 PE, 18:0 PEG750 PE, 18:1 PEG750 PE, 16:0 PEG550 PE, 14:0 PEG550 PE, 18:0 PEG550 PE, 18:1 PEG550 PE, 16:0 PEG350 PE, 14:0 PEG350 PE, 18:0 PEG350 PE, and 18:1 PEG350, sterol PEG derivatives such as Chol-PEG600, and glycerol PEG derivatives such as DMG-PEG5000, DSG-PEG5000, DPG-PEG5000, DMG-PEG3000, DSG-PEG3000, DPG-PEG3000, DMG-PEG2000, DSG-PEG2000, DPG-PEG2000, DMG-PEG1000, DSG-PEG1000, DPG-PEG1000, DMG-PEG750, DSG-PEG750, DPG-PEG750, DMG-PEG550, DSG-PEG550, DPG-PEG550, DMG-PEG350, DSG-PEG350, and DPG-PEG350. In some embodiments, the lipid conjugate is a DMG-PEG. In some particular embodiments, the lipid conjugate is DMG-PEG2000. In some particular embodiments, the lipid conjugate is DMG-PEG5000.

[0474] It is within the level of a skilled artisan to select the cationic lipids, non-cationic lipids and/or lipid conjugates which comprise the lipid nanoparticle, as well as the relative molar ratio of such lipids to each other, such as based upon the characteristics of the selected lipid(s), the nature of the delivery to the intended target cells, and the characteristics of the nucleic acids and/or proteins to be delivered. Additional considerations include, for example, the saturation of the alkyl chain, as well as the size, charge, pH, pKa, fusogenicity and toxicity of the selected lipid(s). Thus, the molar ratios of each individual component may be adjusted accordingly.

[0475] The lipid nanoparticles for use in the method can be prepared by various techniques which are known to a skilled artisan. Nucleic acid-lipid particles and methods of preparation are disclosed in, for example, U.S. Patent Publication Nos. 20040142025 and 20070042031.

[0476] In some embodiments, the lipid nanoparticles will have a size within the range of about 25 to about 500 nm. In some embodiments, the lipid nanoparticles have a size from about 50 nm to about 300 nm, or from about 60 nm to about 120 nm. The size of the lipid nanoparticles may be determined by quasi-electric light scattering (QELS) as described in Bloomfield, Ann. Rev. Biophys. Bioeng., 10:421A150 (1981). A variety of methods are known in the art for producing a population of lipid nanoparticles of particular size ranges, for example, sonication or homogenization. One such method is described in U.S. Pat. No. 4,737,323.

[0477] In some embodiments, the lipid nanoparticles comprise a cell targeting molecule such as, for example, a targeting ligand (e.g., antibodies, scFv proteins, DART molecules, peptides, aptamers, and the like) anchored on the surface of the lipid nanoparticle that selectively binds the lipid nanoparticles to the targeted cell, such as any cell described herein, e.g. a hepatocyte.

[0478] In some embodiments, the vector exhibits the vector exhibits liver cell and/or hepatocyte tropism.

[0479] In some aspects, provided herein are pluralities of vectors that comprise any of the vectors described herein, and one or more additional vectors comprising one or more additional polynucleotides encoding an additional portion or an additional component of any of the DNA-targeting systems described herein, any of the gRNAs described herein, any of the fusion proteins described herein, or a portion or a component of any of the foregoing.

[0480] Provided are pluralities of vectors, that include: a first vector comprising any of the polynucleotides described herein; a second vector comprising any of the polynucleotides described herein; and optionally one or more additional vectors comprising any of the polynucleotides described herein.

[0481] In some aspects, vectors provided herein may be referred to as delivery vehicles. In some aspects, any of the DNA-targeting systems, components thereof, or polynucleotides disclosed herein can be packaged into or on the surface of delivery vehicles for delivery to cells. Delivery vehicles contemplated include, but are not limited to, nanospheres, liposomes, quantum dots, nanoparticles, polyethylene glycol particles, hydrogels, and micelles. As described in the art, a variety of targeting moieties can be used to enhance the preferential interaction of such vehicles with desired cell types or locations.

[0482] Methods of introducing a nucleic acid into a host cell are known in the art, and any known method can be used to introduce a nucleic acid (e.g., an expression construct) into a cell. Suitable methods include, include e.g., viral or bacteriophage infection, transfection, conjugation, protoplast fusion, lipofection, electroporation, calcium phosphate precipitation, polyethyleneimine (PEI)-mediated transfection, DEAE-dextran mediated transfection, liposome-mediated transfection, particle gun technology, calcium phosphate precipitation, direct micro injection, nanoparticle-mediated nucleic acid delivery, and the like. In some embodiments, the composition may be delivered by mRNA delivery and ribonucleoprotein (RNP) complex delivery. Direct delivery of the RNP complex, including the DNA-binding domain complexed with the sgRNA, can eliminate the need for intracellular transcription and translation and can offer a robust platform for host cells with low transcriptional and translational activity. The RNP complexes can be introduced into the host cell by any of the methods known in the art.

[0483] Nucleic acids or RNPs of the disclosure can be incorporated into a host using virus-like particles (VLP). VLPs contain normal viral vector components, such as envelope and capsids, but lack the viral genome. For instance, nucleic acids expressing the Cas and sgRNA can be fused to the viral vector components such as gag and introduced into producer cells. The resulting virus-like particles containing the sgRNA-expressing vectors can infect the host cell for efficient editing.

[0484] Introduction of the complexes, polypeptides, and nucleic acids of the disclosure can occur by protein transduction domains (PTDs). PTDs, including the human immunodeficiency virus-1 TAT, herpes simplex virus-1 VP22, Drsophila Antennapedia Antp, and the poluarginines, are peptide sequences that can cross the cell membrane, enter a host cell, and deliver the complexes, polypeptides, and nucleic acids into the cell.

[0485] Introduction of the complexes, polypeptides, and nucleic acids of the disclosure into cells can occur by viral or bacteriophage infection, transfection, conjugation, protoplast fusion, lipofection, electroporation, nucleofection, calcium phosphate precipitation, polyethyleneimine (PEI)-mediated transfection, DEAE-dextran mediated transfection, liposome-mediated transfection, particle gun technology, calcium phosphate precipitation, direct micro-injection, nanoparticle-mediated nucleic acid delivery, and the like, for example as described in WO 2017/193107 A2, WO 2016/123578 A1, WO 2014/152432 A2, WO 2014/093661 A2, WO 2014/093655 A2, or WO 2021/226555 A2.

[0486] Various methods for the introduction of polynucleotides are well known and may be used with the provided methods and compositions. Exemplary methods include those for transfer of polynucleotides encoding the DNA targeting systems provided herein, including via viral, e.g., retroviral or lentiviral, transduction, transposons, and electroporation.

[0487] In some embodiments, polynucleotides can be cloned into a suitable vector, such as an expression vector or vectors. The expression vector can be any suitable recombinant expression vector, and can be used to transform or transfect any suitable cell. Suitable vectors include those designed for propagation and expansion or for expression or both, such as plasmids and viruses.

[0488] In some embodiments, the vector can a vector of the pUC series (Fermentas Life Sciences), the pBluescript series (Stratagene, LaJolla, Calif.), the pET series (Novagen, Madison, Wis.), the pGEX series (Pharmacia Biotech, Uppsala, Sweden), or the pEX series (Clontech, Palo Alto, Calif.). In some embodiments, animal expression vectors include pEUK-Cl, pMAM and pMAMneo (Clontech). In some embodiments, a viral vector is used, such as a lentiviral or retroviral vector. In some embodiments, the recombinant expression vectors can be prepared using standard recombinant DNA techniques. In some embodiments, vectors can contain regulatory sequences, such as transcription and translation initiation and termination codons, which are specific to the type of host into which the vector is to be introduced, as appropriate and taking into consideration whether the vector is DNA- or RNA-based. In some embodiments, the vector can contain a nonnative promoter operably linked to the nucleotide sequence encoding the recombinant receptor. In some embodiments, the promoter can be a non-viral promoter or a viral promoter, such as a cytomegalovirus (CMV) promoter, an SV40 promoter, an RSV promoter, and a promoter found in the long-terminal repeat of the murine stem cell virus. Other promoters known to a skilled artisan also are contemplated.

[0489] In some embodiments, recombinant nucleic acids are transferred into cells using recombinant infectious virus particles, such as, e.g., vectors derived from simian virus 40 (SV40), adenoviruses, or adeno-associated virus (AAV). In some embodiments, recombinant nucleic acids are transferred into cells (e.g. T cells) using recombinant lentiviral vectors or retroviral vectors, such as gamma-retroviral vectors (see, e.g., Koste et al. (2014) Gene Therapy 2014 Apr. 3. doi: 10.1038/gt.2014.25; Carlens et al. (2000) Exp Hematol 28(10): 1137-46; Alonso-Camino et al. (2013) Mol Ther Nucl Acids 2, e93; Park et al., Trends Biotechnol. 2011 November 29(11): 550-557.

[0490] In some embodiments, the retroviral vector has a long terminal repeat sequence (LTR), e.g., a retroviral vector derived from the Moloney murine leukemia virus (MoMLV), myeloproliferative sarcoma virus (MPSV), murine embryonic stem cell virus (MESV), murine stem cell virus (MSCV), spleen focus forming virus (SFFV), or adeno-associated virus (AAV). Most retroviral vectors are derived from murine retroviruses. In some embodiments, the retroviruses include those derived from any avian or mammalian cell source. The retroviruses typically are amphotropic, meaning that they are capable of infecting host cells of several species, including humans. In one embodiment, the gene to be expressed replaces the retroviral gag, pol and/or env sequences. A number of illustrative retroviral systems have been described (e.g., U.S. Pat. Nos. 5,219,740; 6,207,453; 5,219,740; Miller and Rosman (1989) BioTechniques 7:980-990; Miller, A. D. (1990) Human Gene Therapy 1:5-14; Scarpa et al. (1991) Virology 180:849-852; Burns et al. (1993) Proc. Natl. Acad. Sci. USA 90:8033-8037; and Boris-Lawrie and Temin (1993) Cur. Opin. Genet. Develop. 3: 102-109.

[0491] In some embodiments, the vector is a lentiviral vector. In some embodiments, the lentiviral vector is an integrase-deficient lentiviral vector. In some embodiments, the lentiviral vector is a recombinant lentiviral vector. In some embodiments, the lentivirus is selected or engineered for a desired tropism (e.g. for heptocyte cell tropism). Methods of lentiviral production, transduction, and engineering are known, for example as described in Kasaraneni, N. et al. Sci. Rep. 8(1):10990 (2018), Ghaleh, H. E. G. et al. Biomed. Pharmacother. 128:110276 (2020), and Milone, M. C. et al. Leukemia. 32(7):1529-1541 (2018). Additional methods for lentiviral transduction are described, for example in Wang et al. (2012) J. Immunother. 35(9): 689-701; Cooper et al. (2003) Blood. 101: 1637-1644; Verhoeyen et al. (2009) Methods Mol Biol. 506: 97-114; and Cavalieri et al. (2003) Blood. 102(2): 497-505.

[0492] In some embodiments, recombinant nucleic acids are transferred into cells (e.g. T cells) via electroporation (see, e.g., Chicaybam et al, (2013) PLoS ONE 8(3): e60298 and Van Tedeloo et al. (2000) Gene Therapy 7(16): 1431-1437). In some embodiments, recombinant nucleic acids are transferred into cells via transposition (see, e.g., Manuri et al. (2010) Hum Gene Ther 21(4): 427-437; Sharma et al. (2013) Molec Ther Nucl Acids 2, e74; and Huang et al. (2009) Methods Mol Biol 506: 115-126)). Other methods of introducing and expressing genetic material into cells include calcium phosphate transfection (e.g., as described in Current Protocols in Molecular Biology, John Wiley & Sons, New York. N.Y.), protoplast fusion, cationic liposome-mediated transfection; tungsten particle-facilitated microparticle bombardment (Johnston, Nature, 346: 776-777 (1990)); and strontium phosphate DNA co-precipitation (Brash et al., Mol. Cell Biol., 7: 2031-2034 (1987)).

### III. PHARMACEUTICAL COMPOSITIONS AND FORMULATIONS

[0493] In some aspects, provided herein are compositions, such as pharmaceutical compositions and formulations for administration, that include any of the DNA-targeting systems described herein, or any of the polynucleotides or vectors encoding the same. In some aspects, the pharmaceutical composition contains one or more DNA-targeting systems provided herein or a component thereof. In some aspects, the pharmaceutical composition comprises one or more vectors, e.g., viral vectors that contain polynucleotides that encode one or more components of the DNA-targeting systems provided herein. Such compositions can be used in accord with the provided methods, and/or with the provided articles of manufacture or compositions, such as in the prevention or treatment of diseases, conditions, and disorders, or in detection, diagnostic, and prognostic methods.

[0494] The term “pharmaceutical formulation” refers to a preparation which is in such form as to permit the biological activity of an active ingredient contained therein to be effective, and which contains no additional components which are unacceptably toxic to a subject or a cell to which the formulation would be administered.

[0495] In some embodiments, the pharmaceutical composition may further comprise a pharmaceutically acceptable excipient. The pharmaceutically acceptable excipient may be functional molecules as vehicles, adjuvants, carriers, or diluents.

[0496] A “pharmaceutically acceptable carrier” refers to an ingredient in a pharmaceutical formulation, other than an active ingredient, which is nontoxic to a subject. A pharmaceutically acceptable carrier includes, but is not limited to, a buffer, excipient, stabilizer, or preservative.

[0497] In some aspects, the choice of carrier is determined in part by the particular agent and/or by the method of administration. Accordingly, there are a variety of suitable formulations. For example, the pharmaceutical composition can contain preservatives. Suitable preservatives may include, for example, methylparaben, propylparaben, sodium benzoate, and benzalkonium chloride. In some aspects, a mixture of two or more preservatives is used. The preservative or mixtures thereof are typically present in an amount of about 0.0001% to about 2% by weight of the total composition. Carriers are described, e.g., by Remington's Pharmaceutical Sciences 16th edition, Osol, A. Ed. (1980). Pharmaceutically acceptable carriers are generally nontoxic to recipients at the dosages and concentrations employed, and include, but are not limited to: buffers such as phosphate, citrate, and other organic acids; antioxidants including ascorbic acid and methionine; preservatives (such as octadecyldimethylbenzyl ammonium chloride; hexamethonium chloride; benzalkonium chloride; benzethonium chloride; phenol, butyl or benzyl alcohol; alkyl parabens such as methyl or propyl paraben; catechol; resorcinol; cyclohexanol; 3-pentanol; and m-cresol); low molecular weight (less than about 10 residues) polypeptides; proteins, such as serum albumin, gelatin, or immunoglobulins; hydrophilic polymers such as polyvinylpyrrolidone; amino acids such as glycine, glutamine, asparagine, histidine, arginine, or lysine; monosaccharides, disaccharides, and other carbohydrates including glucose, mannose, or dextrins; chelating agents such as EDTA; sugars such as sucrose, mannitol, trehalose or sorbitol; salt-forming counter-ions such as sodium; metal complexes (e.g. Zn-protein complexes); and/or non-ionic surfactants such as polyethylene glycol (PEG).

[0498] In some embodiments, the pharmaceutically acceptable excipient may be a transfection facilitating agent, which may include surface active agents, such as immune-stimulating complexes (ISCOMS), Freunds incomplete adjuvant, LPS analog including monophosphoryl lipid A, muramyl peptides, quinone analogs, vesicles such as squalene and squalene, hyaluronic acid, lipids, liposomes, calcium ions, viral proteins, polyanions, polycations, or nanoparticles, or other known transfection facilitating agents.

[0499] In some embodiments, the transfection facilitating agent is a polyanion, polycation, including poly-L-glutamate (LGS), or lipid. In some embodiments, the transfection facilitating agent is poly-L-glutamate. In some embodiments, the transfection facilitating agent may also include surface active agents such as immune-stimulating complexes (ISCOMS), Freunds incomplete adjuvant, LPS analog including monophosphoryl lipid A, muramyl peptides, quinone analogs and vesicles such as squalene and squalene, and hyaluronic acid may also be used administered in conjunction with the genetic construct. In some embodiments, the DNA vector encoding the DNA-targeting system may also include a transfection facilitating agent such as lipids, liposomes, including lecithin liposomes or other liposomes known in the art, as a DNA-liposome mixture (see for example WO9324640), calcium ions, viral proteins, polyanions, polycations, or nanoparticles, or other known transfection facilitating agents. In some embodiments, the transfection facilitating agent is a polyanion, polycation, including poly-L-glutamate (LGS), or lipid.

[0500] Compositions in some embodiments are provided as sterile liquid preparations, e.g., isotonic aqueous solutions, suspensions, emulsions, dispersions, or viscous compositions, which may in some aspects be buffered to a selected pH. Liquid preparations are normally easier to prepare than gels, other viscous compositions, and solid compositions. Additionally, liquid compositions are somewhat more convenient to administer, especially by injection. Viscous compositions, on the other hand, can be formulated within the appropriate viscosity range to provide longer contact periods with specific tissues. Liquid or viscous compositions can comprise carriers, which can be a solvent or dispersing medium containing, for example, water, saline, phosphate buffered saline, polyol (for example, glycerol, propylene glycol, liquid polyethylene glycol) and suitable mixtures thereof.

[0501] Sterile injectable solutions can be prepared by incorporating the agent in a solvent, such as in admixture with a suitable carrier, diluent, or excipient such as sterile water, physiological saline, glucose, dextrose, or the like. The formulations to be used for in vivo or ex vivo administration or use are generally sterile. Sterility may be readily accomplished, e.g., by filtration through sterile filtration membranes.

[0502] The pharmaceutical composition in some embodiments contains components in amounts effective to treat or prevent the disease or condition, such as a therapeutically effective or prophylactically effective amount. Therapeutic or prophylactic efficacy in some embodiments is monitored by periodic assessment of treated subjects. For repeated administrations over several days or longer, depending on the condition, the treatment is repeated until a desired suppression of disease symptoms occurs. However, other dosage regimens may be useful and can be determined. The desired dosage can be delivered by a single bolus administration of the composition, by multiple bolus administrations of the composition, or by continuous infusion administration of the composition.

[0503] In some embodiments, the composition can be administered to a subject by any suitable means, for example, by bolus infusion or by injection, e.g., by intravenous or subcutaneous injection. In some embodiments, a given dose is administered by a single bolus administration of the composition. In some embodiments, the composition is administered by multiple bolus administrations of the composition, for example, over a period of no more than 3 days, or by continuous infusion administration of the composition. In some embodiments, the composition is administered parenterally, for example by intravenous, intramuscular, subcutaneous, or intraperitoneal administration. In some embodiments, the composition is administered to a subject using peripheral systemic delivery by intravenous, intraperitoneal, or subcutaneous injection.

[0504] For the prevention or treatment of disease, the appropriate dosage may depend on the type of disease to be treated, the type of agent or agents, the type of cells or recombinant receptors, the severity and course of the disease, whether the agent or cells are administered for preventive or therapeutic purposes, previous therapy, the subject's clinical history and response to the agent or the cells, and the discretion of the attending physician. The compositions are in some embodiments suitably administered to the subject at one time or over a series of treatments.

### IV. METHODS OF TREATMENT

[0505] Provided herein are methods of treatment, e.g., including administering any of the compositions, such as pharmaceutical compositions described herein. In some aspects, also provided are methods of administering any of the compositions described herein to a subject, such as a subject that has a disease or disorder. The compositions, such as pharmaceutical compositions, described herein are useful in a variety of therapeutic, diagnostic and prophylactic indications. For example, the compositions are useful in treating a variety of diseases and disorders in a subject (e.g., human). Such methods and uses include therapeutic methods and uses, for example, involving administration of the compositions, to a subject having a disease, condition, or disorder, such as an HBV viral infection or is associated with an HBV viral infection. In certain embodiments, the subject has been diagnosed with liver disease caused by a Hepatitis B virus infection or a Hepatitis B virus infection. In some embodiments, the HBV viral infection or the associated HBV viral infection is selected from hepatitis D virus infection, delta hepatitis, acute hepatitis B, acute fulminant hepatitis B, chronic hepatitis B, liver fibrosis, end-stage liver disease, or cancer such as hepatocellular carcinoma. The compositions are administered in an effective amount to effect treatment of the disease or disorder. Uses include uses of the compositions in such methods and treatments, and in the preparation of a medicament in order to carry out such therapeutic methods. In some embodiments, the methods are carried out by administering the compositions to the subject having or suspected of having the disease or condition. In some embodiments, the methods thereby treat the disease or condition or disorder in the subject. Also provided are therapeutic methods for administering the cells and compositions to subjects, e.g., patients.

[0506] In some embodiments, the compositions include a DNA-targeting system provided herein, or a polynucleotide or vector encoding the same, in which delivery of the composition to a subject represses transcription of one or more HBV genes and/or regulatory elements thereof resulting in silencing of HBV replication and/or HBV transcription in a subject to thereby treat a disease or condition, including chronic Hepatitis B infection. In some embodiments, administration or use of a composition that includes a DNA-targeting system provided herein, or a polynucleotide or vector encoding the same, reduces expression of one or more genes and/or regulatory elements thereof related to Hepatitis B viral replication and/or HBV transcription. In some embodiments, the Hepatitis B genes and/or regulatory elements thereof are present in a covalently closed circular (cccDNA) form, a relaxed circular DNA (rcNDA) form or are integrated into the human genomic DNA.

[0507] In some aspects, also provided herein are methods of reducing transcription of a Hepatitis B viral DNA sequence, to reduce chronic Hepatitis B infection in a subject, according to any description provided herein. In some aspects, reducing transcription of a Hepatitis B viral DNA sequence results in silencing of Hepatitis B viral replication and/or transcription. For instance, reduced transcription of the Hepatitis B viral DNA sequences results in a reduction of HBsAg transcripts and/or total HBV RNA. Reduced transcription of the Hepatitis B viral DNA sequences may also result in reduced HBsAg levels from integrated and cccDNA form and/or HBcrAg levels from cccDNA form.

[0508] In some embodiments, the methods of administering a composition containing the DNA-targeting system or a polynucleotide or vector encoding the same to a subject as provided herein are carried out in vivo (i.e. in a subject).

[0509] In some embodiments, the methods and uses for administering the DNA-targeting systems result in delivery of the DNA-targeting system to liver cells (e.g. hepatocytes). In some embodiments, the methods of administering the epigenetic-modifying DNA-targeting system (or polynucleotides or vectors for delivery of same to the liver cell(s) or compositions of any of the foregoing) to a subject contacts the DNA-targeting system with a liver cell or a population of liver cells. In some embodiments, the contacting introduces the epigenome-modifying DNA-targeting system (or polynucleotides or vectors for delivery of same to the liver cell or compositions of any of the foregoing) into the liver cell, such as where it is able to translocate or localize to the nucleus of the liver cell. In some embodiments, the methods treat an HBV infection in the liver cell or one or more liver cells in the population.

[0510] In some embodiments, the delivery to liver cells leads to an epigenetic change in the HBV gene or regulatory element, or a combination of genes or regulatory elements, which are targeted by the DNA-targeting system. In some embodiments, the epigenetic change comprises a change in at least one of: DNA accessibility, histone methylation, acetylation, phosphorylation, ubiquitylation, sumoylation, ribosylation, citrullination, and DNA methylation. In some embodiments, the epigenetic change is an altered DNA methylation of a target site in a target gene or a regulatory element thereof as described herein. In some embodiments, the epigenetic change is a histone modification of a target site in a target gene or a regulatory element thereof as described herein. In some embodiments, the delivery of the DNA-targeting system to a liver cell (e.g. hepatocyte) results in reduction of transcription of HBV genes and/or regulatory element thereof in the liver of the subject.

[0511] In some embodiments, the modifications in the HBV epigenome is by targeting a combination of genes and/or regulatory elements thereof as described herein with a provided epigenetic-modifying DNA-targeting system to change the epigenome of HBV. In some embodiments, the modified HBV includes an epigenetic change in a target site at or near a gene or regulatory element thereof involved in controlling HBC replication and/or HBV transcription, comprising polymerase gene, S-family gene, X-gene, or core family gene, or a promoter, enhancer, or a transcript processing control region. In some embodiments, the epigenetic change of any of the above target sites is a change in at least one of: DNA accessibility, histone methylation, acetylation, phosphorylation, ubiquitylation, sumoylation, ribosylation, citrullination, and DNA methylation, compared to a comparable unmodified cell (e.g. liver cell) not subjected to the method, i.e. not contacted or introduced with the DNA-targeting system described herein.

[0512] In some embodiments, the administration of the DNA-binding system modulates expression of a gene and/or regulatory element thereof or a combination of genes and/or regulatory element thereof in a liver cell, such as those described in Section LA. In some embodiments, the gene, transcript or combination of genes and transcripts, such as those described in Section I.A, is reduced in comparison to a comparable unmodified cell (e.g. liver) not subjected to the method, i.e. not contacted or introduced with the DNA-targeting system described herein. In some embodiments, the transcription of the one or more genes is reduced by at least about 1.2-fold, 1.25-fold, 1.3-fold, 1.4-fold, 1.5-fold, 1.6-fold, 1.7-fold, 1.75-fold, 1.8-fold, 1.9-fold, 2-fold, 2.5-fold, 3-fold, 4-fold, 5-fold, 10-fold, 20-fold, 30-fold, 40-fold, 50-fold, 100-fold, 200-fold, 300-fold, 400-fold, 500-fold, 1000-fold or more. In some embodiments, generation of transcripts is reduced by at least about 1.2-fold, 1.25-fold, 1.3-fold, 1.4-fold, 1.5-fold, 1.6-fold, 1.7-fold, 1.75-fold, 1.8-fold, 1.9-fold, 2-fold, 2.5-fold, 3-fold, 4-fold, 5-fold, 10-fold, 20-fold, 30-fold, 40-fold, 50-fold, 100-fold, 200-fold, 300-fold, 400-fold, 500-fold, 1000-fold or more. In some embodiments, reduced transcription of the combination of genes and/or regulatory elements thereof reduces HBV replication and protein levels, in a subject. In some embodiments, the liver cell in the subject has been modulated to have reduced transcription of the polymerase gene, S-family gene, X-gene, or core-family gene. In some embodiments, the expression of each gene of the combination of genes in the modified liver cell is reduced by at least 1.2-fold or more compared to the expression of the same gene in a comparable unmodified liver cell, such as reduced by at or about or greater than 2-fold, 3-fold, 4-fold, 5-fold, 6-fold, 7-fold, 8-fold, 9-fold, 10-fold or more.

[0513] In some embodiments, the disease, condition, or disorder to be treated is in the liver. In some embodiments, the disease, condition, or disorder to be treated is liver disease, cancer, or viral infection. In some embodiments, the disease, condition, or disorder to be treated is hepatitis. In some embodiments, the condition to be treated is liver failure. In some embodiments, the liver failure is fulminant liver failure. In some embodiments, the disease or condition to be treated is liver cirrhosis. In some embodiments, the disease or condition to be treated is a cancer. In some embodiments, the cancer is a solid tumor cancer. In some embodiments, the cancer is hepatocellular cancer. In some embodiments, the hepatitis is acute hepatitis. In some embodiments, the hepatitis is chronic hepatitis.

[0514] In some embodiments, the subject has or is suspected of having elevated levels of HBV transcripts in the liver cells, elevated levels of HBV proteins inside and on the surface of liver cells, and elevated levels of circulating antibodies to HBV proteins. In some embodiments, the subject has or is suspected of having liver disease (e.g., hepatitis), cancer (e.g., hepatocellular carcinoma), or HBV infection (acute or chronic hepatitis).

[0515] Once the multiplexed epigenetic-modifying DNA-targeting system is administered to the subject (e.g., human), the biological activity of the modified cell populations in some aspects is measured by any of a number of known methods. Parameters to assess include reduced levels of HBV transcripts and/or HBV DNA levels in the liver cells (e.g. by qRT-PCR/qPCR), reduced levels of HBV proteins (e.g., HBsAg, HBeAg) inside and on the surface of the liver cells (e.g., assessed by fluorescence staining and flow cytometry), and/or HBeAg, measured by analysis of blood serum using ELISA). In some aspects the biological activity is measured by assessing clinical outcome. Specific thresholds for the parameters can be set to determine the efficacy of the methods of therapy provided herein.

[0516] Also provided are methods of reducing transcription of one or more genes in a cell comprising a Hepatitis B viral sequence. In some embodiments, the method comprises introducing into the cell an epigenetic-modifying DNA-targeting system that induces targeted CpG methylation of a CpG island in a Hepatitis B viral sequence. In some embodiments, the method comprises introducing into the cell an epigenetic-modifying DNA-targeting system that induces targeted CpG methylation of CpG island 2 in a Hepatitis B viral sequence.

[0517] CpG islands are genomic regions that contain a high frequency of CG dinucleotides. Thus, these regions generally have a GC percentage that is greater than about 50% and with an observed/expected CpG ratio that is greater than about 60%. (Gardiner-Garden et al. “CpG islands in vertebrate genomes,” J Mol Biol 196: 261-282 (1987)). CpG islands are often located in the vicinity of genes. Methylation comprises epigenetic methylation of cytosine residues in DNA at sites where it is not typically present in normal cells. Detection of methylation of the CpG islands can be carried out according to methods of this invention, as well as any art-known method, including, but not limited to, e.g., methylation specific-polymerase chain reaction (MS-PCR), a method of nucleic acid amplification that is well known in the art. In this assay, bisulfite modification of the DNA sequence allows the detection of differences between methylated and unmethylated alleles. Reaction of the DNA with sodium bisulfite converts all unmethylated cytosines to uracil, which is recognized as thymine by Taq polymerase, but does not affect methylated cytosines. Amplification with primers specific for methylated or unmethylated DNA discriminates between methylated and unmethylated DNA. This assay provides a simple and fast way of surveying multiple samples to detect methylation of cytosines in the region of interest (Widschwendter et al., “Methylation and silencing of the retinoic acid receptor-beta2 gene in breast cancer” J Natl. Cancer Inst. 92(10):826-832 (2000)). Other methods known in the art for detection and/or quantitative analysis of DNA methylation include, but are not limited to, the chromatin immunoprecipitation assay (ChIP) (Mulero-Navarro et al., Carcinogenesis 27:1099-1104 (2006); Nakagawachi et al., Oncogene 22:8835-8844 (2003)); MethyLight®, a bisulfite modification-dependent fluorescence-based real time PCR assay (Eads et al. Nucleic Acids Res. 28(8) e32 (2000); Erhlich et al., Oncogene 21:6694-6702 (2002)); pyrosequencing (Lee et al. Clinical Cancer Research 14:2664-2672 (2008); Dejeux et al., J. Mol. Diagn. 9:510-520 (2007)); and the Sequenom® MassARRAY® system (Sequenom, Inc., San Diego, Calif.), which utilizes MALDI-TOF mass spectrometry in combination with RNA base specific cleavage (MassCLEAVE™ kit) (Sequenom, Inc., San Diego, Calif.).

[0518] Also provided herein are methods of reducing transcription of one or more genes in a cell comprising a Hepatitis B viral sequence. In some embodiments, the method comprises introducing into the cell an epigenetic-modifying DNA-targeting system that induces targeted CpG methylation of a region within a target region corresponding to 67 bp-392 bp, 1033 bp-1749 bp, or 2215 bp-2490 bp in a Hepatitis B viral sequence with reference to nucleotide positions of SEQ ID NO: 650.

[0519] Also provided herein are methods of reducing one or more genes in a cell comprising a Hepatitis B viral sequence. In some embodiments, the method comprises introducing into the cell an epigenetic-modifying DNA-targeting system that induces targeted CpG methylation of a region within a target region corresponding to 1033 bp-1749 bp in a Hepatitis B viral sequence with reference to nucleotide positions of SEQ ID NO: 650.

[0520] Also provided herein are methods of reducing Hepatitis B virus infection in a cell comprising introducing into a cell comprising a Hepatitis B viral sequence an epigenetic-modifying DNA-targeting system that induces targeted CpG methylation of a CpG island in the Hepatitis B viral sequence.

[0521] Also provided herein are methods of reducing Hepatitis B virus infection in a cell comprising introducing into a cell comprising a Hepatitis B viral sequence an epigenetic-modifying DNA-targeting system that induces targeted CpG methylation of CpG island 2 in the Hepatitis B viral sequence.

[0522] Also provided herein are methods of reducing Hepatitis B virus infection in a cell comprising introducing into a cell comprising a Hepatitis B viral sequence an epigenetic-modifying DNA-targeting system that induces targeted CpG methylation of a region within a target region corresponding to 67 bp-392 bp, 1033 bp-1749 bp, or 2215 bp-2490 bp in a Hepatitis B viral sequence with reference to nucleotide positions of SEQ ID NO: 650.

[0523] Also provided herein are methods of reducing Hepatitis B virus infection in a cell comprising introducing into a cell comprising a Hepatitis B viral sequence an epigenetic-modifying DNA-targeting system that induces targeted CpG methylation of a region within a target region corresponding to 1033 bp-1749 bp in a Hepatitis B viral sequence with reference to nucleotide positions of SEQ ID NO: 650.

[0524] In any of the embodiments herein, the epigenetic modifying DNA-targeting system comprises at least one DNA-targeting module that comprises a fusion protein comprising (a) a DNA-binding domain for targeting a target site in a Hepatitis B viral DNA sequence; and (b) at least one effector domain comprising a DNA methyltransferase effector domain. In some embodiments, the region of CpG methylation is within 500 base pairs of the target region. In some embodiments, the introducing occurs in vivo in a subject or ex vivo. In some embodiments, the cell is a mammalian cell (e.g., human cell). In some embodiments, the cell comprises integrated HBV DNA. In some embodiments, the cell is a hepatocyte comprising a pool of episomal HBV cccDNA. In some embodiments, the hepatocyte expresses HBV proteins, such as HBsAg, and/or HBeAg.

[0525] Also provided herein are methods of promoting epigenetic modification within a target region in a Hepatitis B viral sequence, comprising introducing any of the provided epigenetic modifying DNA-targeting system that targets a target site within the target region into an HBV infected cell comprising a Hepatitis viral sequence.

[0526] Also provided herein are methods of reducing Hepatitis virus infection in a subject comprising administering to a subject infected with Hepatitis B an epigenetic modifying DNA-targeting system that increases CpG methylation of a CpG island in a Hepatitis B viral sequence. In some embodiments, the epigenetic modifying DNA-targeting system comprises (a) a DNA-binding domain for targeting to the target site in a Hepatitis B viral DNA sequence; and (b) at least one effector domain comprising a DNA methyltransferase effector domain.

[0527] Also provided herein are methods of reducing Hepatitis virus infection in a subject comprising administering to a subject infected with Hepatitis B an epigenetic modifying DNA-targeting system that increases CpG methylation of a region within a target region in a Hepatitis B viral sequence. In some embodiments, the target region comprises CpG island 1, CpG island 2, or CpG island 3 in a Hepatitis B viral sequence. In some embodiments, the target region comprises a contiguous sequence of nucleotides within the sequence corresponding to 67 bp-392 bp, 1033 bp-1749 bp, or 2215 bp-2490 bp in a Hepatitis B viral sequence with reference to nucleotide positions of SEQ ID NO: 650. In some embodiments, the target region comprises a contiguous sequence of nucleotides within the sequence corresponding to 1255 bp-1290 bp in a Hepatitis B viral sequence with reference to nucleotide positions of SEQ ID NO: 650. In some embodiments, the epigenetic modifying DNA-targeting system comprises (a) a DNA-binding domain for targeting to the target site in a Hepatitis B viral DNA sequence; and (b) at least one effector domain comprising a DNA methyltransferase effector domain.

[0528] In any of the embodiments herein, the region of CpG methylation is within about 1000 bp, about 750 bp, about 600 bp, about 500 bp, about 450 bp, about 400 bp, about 350 bp, about 300 bp, about 250 bp, about 200 bp, about 150 bp, about 100 bp, about 50 bp of the target region.

### V. KITS AND ARTICLES OF MANUFACTURE

[0529] Also provided are articles of manufacture, systems, apparatuses, and kits useful in performing the provided embodiments. In some embodiments, the provided articles of manufacture or kits contain any of the DNA-targeting systems described herein, any of the gRNAs described herein, any of the fusion proteins described herein, any of the polynucleotides described herein, any of the pluralities of polynucleotides described herein, any of the vectors described herein, any of the pluralities of vectors described herein, or a portion or a component of any of the foregoing, or any combination thereof. In some embodiments, the articles of manufacture or kits include polypeptides, polynucleotides, nucleic acids, and/or vectors useful in performing the provided methods.

[0530] In some embodiments, the articles of manufacture or kits include one or more containers, typically a plurality of containers, packaging material, and a label or package insert on or associated with the container or containers and/or packaging, generally including instructions for use, e.g., instructions for introducing or administering.

[0531] Also provided are articles of manufacture, systems, apparatuses, and kits useful in administering the provided compositions, e.g., pharmaceutical compositions, e.g., for use in therapy or treatment. In some embodiments, the articles of manufacture or kits provided herein contain vectors and/or plurality of vectors, such as any vectors and/or plurality of vectors described herein. In some aspects, the articles of manufacture or kits provided herein can be used for administration of the vectors and/or plurality of vectors, and can include instructions for use.

[0532] The articles of manufacture and/or kits containing cells or cell compositions for therapy, may include a container and a label or package insert on or associated with the container. Suitable containers include, for example, bottles, vials, syringes, IV solution bags, etc. The containers may be formed from a variety of materials such as glass or plastic. The container in some embodiments holds a composition which is by itself or combined with another composition effective for treating, preventing and/or diagnosing the condition. In some embodiments, the container has a sterile access port. Exemplary containers include an intravenous solution bags, vials, including those with stoppers pierceable by a needle for injection, or bottles or vials for orally administered agents. The label or package insert may indicate that the composition is used for treating a disease or condition. The article of manufacture may further include a package insert indicating that the compositions can be used to treat a particular condition. Alternatively, or additionally, the article of manufacture may further include another or the same container comprising a pharmaceutically-acceptable buffer. It may further include other materials such as other buffers, diluents, filters, needles, and/or syringes.

### VI. DEFINITIONS

[0533] Unless defined otherwise, all terms of art, notations and other technical and scientific terms or terminology used herein are intended to have the same meaning as is commonly understood by one of ordinary skill in the art to which the claimed subject matter pertains. In some cases, terms with commonly understood meanings are defined herein for clarity and/or for ready reference, and the inclusion of such definitions herein should not necessarily be construed to represent a substantial difference over what is generally understood in the art.

[0534] As used herein, the singular forms “a,” “an,” and “the” include plural referents unless the context clearly dictates otherwise. For example, “a” or “an” means “at least one” or “one or more.” It is understood that aspects and variations described herein include “consisting” and/or “consisting essentially of” aspects and variations.

[0535] Throughout this disclosure, various aspects of the claimed subject matter are presented in a range format. It should be understood that the description in range format is merely for convenience and brevity and should not be construed as an inflexible limitation on the scope of the claimed subject matter. Accordingly, the description of a range should be considered to have specifically disclosed all the possible sub-ranges as well as individual numerical values within that range. For example, where a range of values is provided, it is understood that each intervening value, between the upper and lower limit of that range and any other stated or intervening value in that stated range is encompassed within the claimed subject matter. The upper and lower limits of these smaller ranges may independently be included in the smaller ranges, and are also encompassed within the claimed subject matter, subject to any specifically excluded limit in the stated range. Where the stated range includes one or both of the limits, ranges excluding either or both of those included limits are also included in the claimed subject matter. This applies regardless of the breadth of the range.

[0536] The term “about” as used herein refers to the usual error range for the respective value readily known. Reference to “about” a value or parameter herein includes (and describes) embodiments that are directed to that value or parameter per se. For example, description referring to “about X” includes description of “X”. In some embodiments, “about” may refer to ±25%, ±20%, ±15%, ±10%, ±5%, or ±1%.

[0537] As used herein, the term, “corresponding to” with reference to positions of a nucleotide sequence (or base pair) or protein sequence (amino acid), such as recitation that nucleotides or amino acid positions “correspond to” base pair or amino acid positions in a disclosed sequence, such as set forth in the Sequence listing, refers to nucleotides or amino acid positions identified upon alignment with the disclosed sequence to maximize identity using a standard alignment algorithm, such as the GAP algorithm. By aligning the sequences, corresponding residues can be identified, for example, using conserved and identical amino acid residues as guides. In general, to identify corresponding positions, the sequences of amino acids are aligned so that the highest order match is obtained (see, e.g.: Computational Molecular Biology, Lesk, A.M., ed., Oxford University Press, New York, 1988; Biocomputing: Informatics and Genome Projects, Smith, D. W., ed., Academic Press, New York, 1993; Computer Analysis of Sequence Data, Part I, Griffin, A. M., and Griffin, H. G., eds., Humana Press, New Jersey, 1994; Sequence Analysis in Molecular Biology, von Heinje, G., Academic Press, 1987; and Sequence Analysis Primer, Gribskov, M. and Devereux, J., eds., M Stockton Press, New York, 1991; Carrillo et al. (1988) SIAM J Applied Math 48: 1073).

[0538] A “gene,” includes a DNA region encoding a gene product, as well as all DNA regions which regulate the production of the gene product, whether or not such regulatory sequences are adjacent to coding and/or transcribed sequences. Accordingly, a gene includes, but is not necessarily limited to, promoter sequences, terminators, translational regulatory sequences such as ribosome binding sites and internal ribosome entry sites, enhancers, silencers, insulators, boundary elements, replication origins, matrix attachment sites and locus control regions. The sequence of a gene is typically present at a fixed chromosomal position or locus on a chromosome in the cell.

[0539] A “regulatory element” or “DNA regulatory element,” which terms are used interchangeably herein, in reference to a gene refers to DNA regions which regulate the production of a gene product, whether or not such regulatory sequences are adjacent to coding and/or transcribed sequences. Accordingly, a regulatory element includes, but is not necessarily limited to, promoter sequences, terminators, translational regulatory sequences such as ribosome binding sites and internal ribosome entry sites, enhancers, silencers, insulators, boundary elements, replication origins, matrix attachment sites and locus control regions.

[0540] As used herein, a “target site” or “target nucleic acid sequence” is a nucleic acid sequence that defines a portion of a nucleic acid to which a binding molecule (e.g. a DNA-binding domain disclosed herein) will bind, provided sufficient conditions for binding exist.

[0541] The term “expression” with reference to a gene or “gene expression” refers to the conversion of the information, contained in a gene, into a gene product. A gene product can be the direct transcriptional product of a gene (e.g., mRNA, tRNA, rRNA, antisense RNA, ribozyme, structural RNA or any other type of RNA) or can be a protein produced by translation of an mRNA. Gene products also include RNAs which are modified, by processes such as capping, polyadenylation, methylation, and editing, and proteins modified by, for example, methylation, acetylation, phosphorylation, ubiquitination, ADP-ribosylation, myristoylation, and glycosylation. Hence, reference to expression or gene expression includes protein (or polypeptide) expression or expression of a transcribable product of or a gene such as mRNA. The protein expression may include intracellular expression or surface expression of a protein. Typically, expression of a gene product, such as mRNA or protein, is at a level that is detectable in the cell.

[0542] As used herein, a “detectable” expression level, means a level that is detectable by standard techniques known to a skilled artisan, and include for example, differential display, RT (reverse transcriptase)-coupled polymerase chain reaction (PCR), Northern Blot, and/or RNase protection analyses as well as immunoaffinity-based methods for protein detection, such as flow cytometry, ELISA, or western blot. The degree of expression levels need only be large enough to be visualized or measured via standard characterization techniques.

[0543] As used herein, the term “DNA-targeting system” or “epigenetic-modifying DNA-targeting system” refers to a composition comprising a DNA-binding domain (such as any Cas, ZFN, or TALE-based DNA-binding domain described herein) that targets a target site of a target gene and/or regulatory element thereof. In some embodiments, the DNA-targeting system is engineered to target the target site. In some embodiments, the DNA-targeting system comprises one or more effector domains that modify transcription of the target gene and/or regulatory element thereof when recruited to the target site by the DNA-targeting system. In some embodiments, the DNA-targeting system is capable of targeting more than one target site (i.e. a plurality of target sites), such as 2, 3, 4, 5, 6, or more target sites.

[0544] As used herein, the term “DNA-targeting module” refers to any composition or portion of a DNA-targeting system described herein that targets one target site. For example, an individual DNA-targeting module may comprise a fusion protein comprising a DNA-binding domain (e.g. a ZFN or TALE DNA-binding domain) that targets a target site for a target gene and/or regulatory element thereof, and a transcriptional repressor domain (e.g. KRAB). In other embodiments, a DNA-targeting module comprises (a) a fusion protein comprising a Cas protein and a transcriptional repressor domain, and (b) a gRNA that targets a target site of a target gene and/or regulatory element thereof. A DNA-targeting system provided herein may comprise one or more (such as two) DNA-targeting modules. A DNA-targeting system provided herein may comprise 2 to 10 DNA-targeting modules.

[0545] In some embodiments, two DNA-targeting modules of a DNA-targeting system may comprise separate, (i.e. non-overlapping) components. For example, a DNA-targeting system may comprise two different fusion proteins, each fusion protein targeting and repressing a different gene and/or regulatory element thereof. For example, the DNA-targeting system may comprise a first DNA-targeting module comprising a first fusion protein comprising a DNA-binding domain (such as a ZFN or TALE DNA-binding domain) that targets a target site for a first gene and a transcriptional repressor domain, and a second DNA-targeting module comprising a second fusion protein comprising a DNA-binding domain that targets a target site for a second gene and a transcriptional repressor domain. In another example, the DNA-targeting system may comprise a first DNA-targeting module comprising a first fusion protein comprising a DNA-binding domain that targets a target site for a first gene (such as a ZFN or TALE DNA-binding domain) and a transcriptional repressor domain, and a second DNA-targeting module comprising (a) a fusion protein comprising a Cas protein and a transcriptional repressor domain and (b) a gRNA that targets a target site for a second gene. In another example, the DNA-targeting system may comprise a first DNA-targeting module comprising a first fusion protein comprising a first Cas protein and a transcriptional repressor domain, and (b) a first gRNA that complexes with the first Cas protein and targets a target site for a first target gene, and a second DNA-targeting module comprising a second fusion protein comprising a second Cas protein that is different from the first Cas protein and a transcriptional repressor domain, and (b) a second gRNA that complexes with the second Cas protein and targets the second Cas protein to a target site for a second target gene. It will be understood that different Cas protein variants (e.g. SpCas9 and SaCas9) are compatible with different gRNA scaffold sequences and PAMs, as described herein. Thus, it is possible to engineer a single DNA-targeting system comprising multiple non-overlapping CRISPR/Cas-based DNA-targeting modules, each targeting a different target site.

[0546] In some embodiments, two DNA-targeting modules of a DNA-targeting system may comprise shared (i.e. overlapping) components. For example, a DNA-targeting system may comprise a first DNA-targeting module comprising (a) a fusion protein comprising a Cas protein and a transcriptional repressor domain, and (b) a gRNA that targets a target site for a first gene or regulatory element thereof, and a second DNA-targeting module comprising (a) the fusion protein of the first DNA-targeting module, and (b) a gRNA that targets a target site for a second gene or regulatory element thereof. It will be understood that providing two or more different gRNAs for a given Cas protein allows different molecules of the same Cas protein to be targeted to the target sites of the two or more gRNAs.

[0547] As used herein, the term “reduced expression” or “decreased expression” means any form of expression that is lower than the expression in an original or source cell that does not contain the modification for modulating a particular gene expression by a DNA-targeting system, for instance a wild-type expression level (which can be absence of expression or immeasurable expression as well). Reference herein to “reduced expression,” or “decreased expression” is taken to mean a decrease in gene expression relative to the level in a cell that does not contain the modification, such as the original source cell prior to contacting with, or engineering to introduce, the DNA-binding system into the T cell, such as an unmodified cell or a wild-type T cell. The decrease in expression can be at least 5%, 10%, 20%, 30%, 40% or 50%, 60%, 70%, 80%, 85%, 90%, or 100% or even more. In some cases, the decrease in expression can be at least 2-fold, 5-fold, 10-fold, 20-fold, 30-fold, 40-fold, 50-fold, 60-fold, 70-fold, 80-fold, 90-fold, 100-fold, 200-fold or more.

[0548] As used herein, the term “reduced transcription” or “decreased transcription” refers to the level of transcription of a gene that is lower than the transcription of the gene in an original or source cell that does not contain the modification for modulating transcription by a DNA-targeting system, for instance a wild-type transcription level of a gene. Reference to reduced transcription or decreased transcription can refer to reduction in the levels of a transcribable product of a gene such as mRNA. Any of a variety of methods can be used to monitor or quantitate a level of a transcribable product such as mRNA, including but not limited to, real-time quantitative RT (reverse transcriptase)-polymerase chain reaction (qRT-PCR), Northern Blot, microarray analysis, or RNA sequencing (RNA-Seq). The reduction in transcription can be at least 5%, 10%, 20%, 30%, 40% or 50%, 60%, 70%, 80%, 85%, 90%, or 100% or even more. In some cases, the reduction in transcription can be at least 1-fold, 2-fold, 5-fold, 10-fold, 20-fold, 30-fold, 40-fold, 50-fold, 60-fold, 70-fold, 80-fold, 90-fold, 100-fold, 200-fold or more.

[0549] As used herein, an “epigenetic modification” refers to changes in the gene expression that are not caused by changes in the DNA sequences but are due to events like DNA methylations, histone modifications, miRNA expression modulation.

[0550] As used herein, the term “modification” or “modified” with reference to a T cell refers to any change or alteration in a cell that impacts gene expression in the cell. In some embodiments, the modification is an epigenetic modification that directly changes the epigenetic state of a gene or regulatory elements thereof to alter (e.g. decrease) expression of a gene product. In some embodiments, a modification described herein results in decreased expression of a target gene or selected polynucleotide sequence.

[0551] As used herein, a “fusion” molecule is a molecule in which two or more subunit molecules are linked, such as covalently. Examples of a fusion molecule include, but are not limited to, fusion proteins (for example, a fusion between a DNA-binding domain such as a ZFP, TALE DNA-binding domain or CRISPR-Cas protein and one or more effector domains, such as a transactivation domain). The fusion molecule also may be part of a system in which a polynucleotide component associates with a polypeptide component to form a functional molecule (e.g., a CRISPR/Cas system in which a single guide RNA associates with a functional domain to modulate gene expression). Fusion molecules also include fusion nucleic acids, for example, a nucleic acid encoding the fusion protein. Expression of a fusion protein in a cell can result from delivery of the fusion protein to the cell or by delivery of a polynucleotide encoding the fusion protein to a cell, where the polynucleotide is transcribed, and the transcript is translated, to generate the fusion protein.

[0552] The term “methylation,” as used herein, refers to the presence of epigenetic methylation of cytosine residues in DNA at sites where it is not typically present in normal cells.

[0553] The term “vector,” as used herein, refers to a nucleic acid molecule capable of propagating another nucleic acid to which it is linked. The term includes the vector as a self-replicating nucleic acid structure as well as the vector incorporated into the genome of a host cell into which it has been introduced. Certain vectors are capable of directing the expression of nucleic acids to which they are operatively linked. Such vectors are referred to herein as “expression vectors.” Among the vectors are viral vectors, such as adenoviral vectors or lentiviral vectors.

[0554] The term “expression vector” refers to a vector comprising a recombinant polynucleotide comprising expression control sequences operatively linked to a nucleotide sequence to be expressed. An expression vector comprises sufficient cis-acting elements for expression; other elements for expression can be supplied by the host cell or in an in vitro expression system. Expression vectors include, but are not limited to, cosmids, plasmids (e.g., naked or contained in liposomes) and viruses (e.g., lentiviruses, retroviruses, adenoviruses, and adeno-associated viruses) that incorporate the recombinant polynucleotide.

[0555] The term “isolated” means altered or removed from the natural state. For example, a nucleic acid or a peptide naturally present in a living animal is not “isolated,” but the same nucleic acid or peptide partially or completely separated from the coexisting materials of its natural state is “isolated.” An isolated nucleic acid or protein can exist in substantially purified form, or can exist in a non-native environment such as, for example, a host cell.

[0556] The term “polynucleotide” refers to a chain of nucleotides. Furthermore, nucleic acids are polymers of nucleotides. Thus, nucleic acids and polynucleotides as used herein are interchangeable. One skilled in the art has the general knowledge that nucleic acids are polynucleotides, which can be hydrolyzed into the monomelic “nucleotides.” The monomelic nucleotides can be hydrolyzed into nucleosides. As used herein polynucleotides include, but are not limited to, all nucleic acid sequences which are obtained by any means available in the art, including, without limitation, recombinant means, i.e., the cloning of nucleic acid sequences from a recombinant library or a cell genome, using ordinary cloning technology and PCR™, and the like, and by synthetic means.

[0557] As used herein, the terms “peptide,” “polypeptide,” and “protein” are used interchangeably, and refer to a compound comprised of amino acid residues covalently linked by peptide bonds. A protein or peptide must contain at least two amino acids, and no limitation is placed on the maximum number of amino acids that can comprise a protein's or peptide's sequence. Polypeptides include any peptide or protein comprising two or more amino acids joined to each other by peptide bonds. As used herein, the term refers to both short chains, which also commonly are referred to in the art as peptides, oligopeptides and oligomers, for example, and to longer chains, which generally are referred to in the art as proteins, of which there are many types. “Polypeptides” include, for example, biologically active fragments, substantially homologous polypeptides, oligopeptides, homodimers, heterodimers, variants of polypeptides, modified polypeptides, derivatives, analogs, fusion proteins, among others. The polypeptides include natural peptides, recombinant peptides, synthetic peptides, or a combination thereof.

[0558] As used herein, “percent (%) amino acid sequence identity” and “percent identity” when used with respect to an amino acid sequence (reference polypeptide sequence) is defined as the percentage of amino acid residues in a candidate sequence (e.g., the subject antibody or fragment) that are identical with the amino acid residues in the reference polypeptide sequence, after aligning the sequences and introducing gaps, if necessary, to achieve the maximum percent sequence identity, and not considering any conservative substitutions as part of the sequence identity. Alignment for purposes of determining percent amino acid sequence identity can be achieved in various known ways, in some embodiments, using publicly available computer software such as BLAST, BLAST-2, ALIGN or Megalign (DNASTAR) software. Appropriate parameters for aligning sequences can be determined, including any algorithms needed to achieve maximal alignment over the full length of the sequences being compared.

[0559] In some embodiments, “operably linked” may include the association of components, such as a DNA sequence, (e.g. a heterologous nucleic acid) and a regulatory sequence(s), in such a way as to permit gene expression when the appropriate molecules (e.g. transcriptional repressor proteins) are bound to the regulatory sequence. Hence, it means that the components described are in a relationship permitting them to function in their intended manner.

[0560] An amino acid substitution may include replacement of one amino acid in a polypeptide with another amino acid. The substitution may be a conservative amino acid substitution or a non-conservative amino acid substitution. Amino acid substitutions may be introduced into a binding molecule, e.g., antibody, of interest and the products screened for a desired activity, e.g., retained/improved antigen binding, decreased immunogenicity, or improved ADCC or CDC.

[0561] Amino acids generally can be grouped according to the following common side-chain properties:
[0562] (1) hydrophobic: Norleucine, Met, Ala, Val, Lu, Ile;
[0563] (2) neutral hydrophilic: Cys, Ser, Thr, Asn, Gln;
[0564] (3) acidic: Asp, Glu;
[0565] (4) basic: His, Lys, Arg;
[0566] (5) residues that influence chain orientation: Gly, Pro;
[0567] (6) aromatic: Trp, Tyr, Phe.

[0568] In some embodiments, conservative substitutions can involve the exchange of a member of one of these classes for another member of the same class. In some embodiments, non-conservative amino acid substitutions can involve exchanging a member of one of these classes for another class.

[0569] As used herein, a composition refers to any mixture of two or more products, substances, or compounds, including cells. It may be a solution, a suspension, liquid, powder, a paste, aqueous, non-aqueous or any combination thereof.

[0570] As used herein, a “subject” or an “individual,” which are terms that are used interchangeably, is a mammal. In some embodiments, a “mammal” includes humans, non-human primates, domestic and farm animals, and zoo, sports, or pet animals, such as dogs, horses, rabbits, cattle, pigs, hamsters, gerbils, mice, ferrets, rats, cats, monkeys, etc. In some embodiments, the subject or individual is human. In some embodiments, the subject is a patient that is known or suspected of having a disease, disorder or condition.

[0571] As used herein, the term “treating” and “treatment” includes administering to a subject an effective amount of cells (e.g. T cells), such as such cells that have been modified by a DNA-targeting system or polynucleotide(s) encoding the DNA-targeting system described herein, so that the subject has a reduction in at least one symptom of the disease or an improvement in the disease, for example, beneficial or desired clinical results. For purposes of this technology, beneficial or desired clinical results include, but are not limited to, alleviation of one or more symptoms, diminishment of extent of disease, stabilized (i.e., not worsening) state of disease, delay or slowing of disease progression, amelioration or palliation of the disease state, and remission (whether partial or total), whether detectable or undetectable. Treating can refer to prolonging survival as compared to expected survival if not receiving treatment. Thus, one of skill in the art realizes that a treatment may improve the disease condition, but may not be a complete cure for the disease. In some embodiments, one or more symptoms of a disease or disorder are alleviated by at least 5%, at least 10%, at least 20%, at least 30%, at least 40%, or at least 50% upon treatment of the disease.

[0572] The term “therapeutically effective amount” refers to the amount of the subject compound that will elicit the biological or medical response of a tissue, system, or subject that is being sought by the researcher, veterinarian, medical doctor or other clinician. The term “therapeutically effective amount” includes that amount of a biological molecule, such as a compound or cells, that, when administered, is sufficient to prevent development of, or alleviate to some extent, one or more of the signs or symptoms of the disorder or disease being treated. The therapeutically effective amount will vary depending on the biological molecule, the disease and its severity and the age, weight, etc., of the subject to be treated.

### VII. EXEMPLARY EMBODIMENTS

[0573] Among the provided embodiments are:

[0574] 1. An epigenetic-modifying DNA-targeting system comprising at least one DNA-targeting module for repressing transcription of one or more Hepatitis B viral (HBV) genes, wherein each of the at least one DNA-targeting module comprises a fusion protein comprising:
[0575] (a) a DNA-binding domain for targeting to a target site in a Hepatitis B viral DNA sequence; and
[0576] (b) at least one transcriptional repressor effector domain.

[0577] 2. The epigenetic-modifying DNA-targeting system of embodiment 1, wherein the at least one DNA-binding domain comprises a Clustered Regularly Interspaced Short Palindromic Repeats associated (Cas)-guide RNA (gRNA) combination comprising (a) a Cas protein or a variant thereof and (b) at least one gRNA that is able to associate with the Cas protein to target the Cas protein to the target site; a zinc finger protein (ZFP); a transcription activator-like effector (TALE); a meganuclease; a homing endonuclease; or an I-SceI enzyme or a variant thereof, optionally wherein the DNA-binding domain comprises a catalytically inactive variant of any of the foregoing.

[0578] 3. The epigenetic-modifying DNA-targeting system of embodiment 1 or 2, wherein the Hepatitis B viral DNA sequence is an HBV gene or a regulatory element thereof.

[0579] 4. The epigenetic-modifying DNA-targeting system of any of embodiments 1-3, wherein the at least one DNA-targeting module comprises a plurality of DNA-targeting modules for targeting a plurality of target sites of one or a plurality of HBV genes or regulatory elements thereof.

[0580] 5. The epigenetic-modifying DNA-targeting system of embodiment 4, wherein the plurality of DNA-targeting modules comprise at least a first DNA-targeting module and a second DNA-targeting module, wherein: (1) the first DNA-targeting module represses transcription of a first HBV gene, wherein the first DNA-targeting module comprises a first fusion protein comprising (a) a DNA-binding domain for targeting a target site of the first gene or regulatory DNA element thereof; and (b) at least one transcriptional repressor domain; and

[0581] (2) the second DNA-targeting module represses transcription of a second HBV gene, wherein the second DNA-targeting module comprises a second fusion protein comprising (a) a DNA-binding domain for targeting a target site of the second gene or regulatory DNA element thereof; and (b) at least one transcriptional repressor domain, optionally wherein:
[0582] the first DNA-targeting module and the second DNA-targeting module share the same fusion protein such that the first and second fusion protein are the same, and wherein the DNA-binding domain of the fusion protein is a Clustered Regularly Interspaced Short Palindromic Repeats associated (Cas) protein or variant thereof that is that is able to associate with a first guide RNA (gRNA) and a second gRNA, wherein
[0583] the first DNA-targeting module comprises the first gRNA that targets a target site of a first HBV gene or regulatory element thereof, and the second DNA-targeting module comprises the second gRNA that targets a target site of a second HBV gene or regulatory element thereof.

[0584] 6. An epigenetic-modifying DNA-targeting system for repressing transcription of one or more Hepatitis B viral (HBV) genes, wherein the DNA-targeting system comprises:
[0585] (a) a fusion protein comprising a Clustered Regularly Interspaced Short Palindromic Repeats associated (Cas) protein or variant thereof and at least one transcriptional repressor effector domain; and
[0586] (b) a plurality of guide RNAs (gRNAs) comprising at least a first gRNA and a second gRNA,
[0587] wherein the first gRNA targets a target site of a first HBV gene or regulatory element thereof, and the second gRNA targets a target site of a second HBV gene or regulatory element thereof,
[0588] wherein the first and second genes or regulatory elements thereof regulate Hepatitis B virus replication and/or HBV transcription.

[0589] 7. The epigenetic-modifying DNA-targeting system of embodiment 6, wherein the DNA-targeting system further comprises a third gRNA that targets a target site of a third gene or regulatory element thereof that regulates Hepatitis B virus replication and/or HBV transcription,
[0590] optionally wherein the system further comprises a fourth gRNA that targets a target site of a fourth gene or regulatory element thereof, optionally a fifth gRNA that targets a fifth gene or regulatory element thereof, and/or optionally a sixth gRNA that targets a target site of a sixth gene or regulatory element thereof,
[0591] wherein the genes or regulatory element thereof regulate Hepatitis B virus replication and/or HBV transcription.

[0592] 8. The epigenetic-modifying DNA-targeting system of embodiment 7, wherein the first, second, third, fourth, fifth, and/or sixth genes or regulatory elements thereof are different.

[0593] 9. An epigenetic-modifying DNA-targeting system for repressing transcription of one or more Hepatitis B viral (HBV) genes, wherein the DNA-targeting system comprises:
[0594] (a) a fusion protein comprising a Clustered Regularly Interspaced Short Palindromic Repeats associated (Cas) protein or variant thereof and at least one transcriptional repressor effector domain; and
[0595] (b) a plurality of guide RNAs (gRNAs) targeting a plurality of target sites of a plurality of genes or regulatory elements thereof,
[0596] wherein the plurality of genes or regulatory elements thereof regulate Hepatitis B virus replication and/or HBV transcription.

[0597] 10. An epigenetic-modifying DNA-targeting system comprising a single DNA-targeting module for repressing transcription of more than one Hepatitis B viral (HBV) genes, wherein the DNA-targeting module comprises:
[0598] (a) a fusion protein comprising a Clustered Regularly Interspaced Short Palindromic Repeats associated (Cas) protein or variant thereof and at least one transcriptional repressor effector domain; and
[0599] (b) a guide RNAs (gRNA) targeting a plurality of target sites of a plurality of genes or regulatory elements thereof,
[0600] wherein the plurality of genes or regulatory elements thereof regulate Hepatitis B virus replication and/or HBV transcription.

[0601] 11. The epigenetic-modifying DNA-targeting system of any of embodiments 1-10, wherein repressing transcription results in reduced HBV replication and/or reduced HBV protein levels.

[0602] 12. The epigenetic-modifying DNA-targeting system of any of embodiments 1-11, wherein the DNA-targeting system does not introduce a genetic disruption or a DNA break.

[0603] 13. The epigenetic-modifying DNA-targeting system of any of embodiments 1-9, and 11-12, wherein the at least one DNA-binding module comprises a plurality of DNA-binding modules that together target a plurality of target sites in the HBV DNA sequence, optionally wherein each DNA-binding module targets a different target site in the HBV DNA sequence.

[0604] 14. The epigenetic-modifying DNA-targeting system of any of embodiments 4, 5 and 9-13, wherein the plurality of target sites are 2, 3, 4, 5, or 6 different target sites.

[0605] 15. The epigenetic-modifying DNA-targeting system of any of embodiments 4, 5 and 9-14, wherein the plurality of target sites are each in a different HBV gene or a regulatory element thereof.

[0606] 16. The epigenetic-modifying DNA-targeting system of any of embodiments 1-14, wherein each target site is in the same HBV gene or a regulatory element thereof.

[0607] 17. The epigenetic-modifying DNA-targeting system of any of embodiments 1-5 and 11-16, wherein the system comprises 2 to 10 DNA-targeting modules.

[0608] 18. The epigenetic-modifying DNA-targeting system of any of embodiments 1-5 and 11-17, wherein any two or more of the DNA-targeting modules share the same fusion protein or wherein any two or more of the DNA-targeting modules comprise different fusion proteins.

[0609] 19. The epigenetic-modifying DNA-targeting system of any of embodiments 1-5 and 11-18, wherein the DNA-binding domain of each DNA-targeting module comprises a fusion protein comprising a Clustered Regularly Interspaced Short Palindromic Repeats associated (Cas) protein or variant thereof and at least one transcriptional repressor effector domain and wherein each DNA-targeting module comprises a unique gRNA.

[0610] 20. The epigenetic-modifying DNA-targeting system of any of embodiments 1-19, wherein the target site, or each of the target sites, is present in a covalently closed circular DNA (cccDNA) form, relaxed circular DNA (rcDNA) form and/or is in HBV viral DNA integrated in the human genomic DNA.

[0611] 21. The epigenetic-modifying DNA-targeting system of any of embodiments 1-20, wherein the target site, or each of the target sites, is present at or near a gene or a regulatory element thereof involved in controlling HBV replication and/or HBV transcription.

[0612] 22. The epigenetic-modifying DNA-targeting system of embodiment 21, wherein the gene involved in controlling HBV replication and/or HBV transcription encodes a polymerase, an envelope protein, capsid protein, transcription factor, or transcriptional transactivator.

[0613] 23. The epigenetic-modifying DNA-targeting system of embodiment 21 or embodiment 22, wherein the gene involved in controlling HBV replication and/or HBV transcription is a polymerase gene, S-family gene, X-gene, or core family gene.

[0614] 24. The epigenetic-modifying DNA-targeting system of any of embodiments 1-23, wherein at least one target site is in gene or regulatory element thereof of the X-gene encoding Hepatitis B Virus Protein X (HBx).

[0615] 25. The epigenetic-modifying DNA-targeting system of any of embodiments 1-24, wherein the target site, or each of the target sites, is at or near a regulatory element of the HBV gene involved in controlling HBV replication and/or HBV transcription.

[0616] 26. The epigenetic-modifying DNA-targeting system of embodiment 25, wherein the regulatory element is a promoter region.

[0617] 27. The epigenetic-modifying DNA-targeting system of embodiment 26, wherein the promoter region is a pre-S1 promoter, a pre-S2 promoter, X promoter, or basal core promoter.

[0618] 28. The epigenetic-modifying DNA-targeting system of embodiment 25, wherein the regulatory element is an enhancer region.

[0619] 29. The epigenetic-modifying DNA-targeting system of embodiment 28, wherein the enhancer region is an Enh1 or an Enh2 enhancer region.

[0620] 30. The epigenetic-modifying DNA-targeting system of embodiment 25, wherein the regulatory element is a transcript processing control region.

[0621] 31. The epigenetic-modifying DNA-targeting system of any of embodiments 1-24, wherein the target site, or each of the target sites, is in a coding region of an HBV gene.

[0622] 32. The epigenetic-modifying DNA-targeting system of any of embodiments 1-31, wherein the target site, or each of the target sites, is located within 500 base pairs (bp), within 1000 bp, within 1500 bp of a transcription start site.

[0623] 33. The epigenetic-modifying DNA-targeting system of any of embodiments 1-32, wherein the target site, or each of the target sites, is positioned within a target region that is located at base pairs between 0-3300 base pairs (bp) of the HBV genome, optionally between 0-3182 bp corresponding to positions with reference to the HBV genome set forth in SEQ ID NO: 650.

[0624] 34. The epigenetic-modifying DNA-targeting system of any of embodiments 1-33, wherein the target site, or each of the target sites, is positioned within a target region that has a sequence corresponding to the sequence located at base pairs between 43 bp-490 bp, 1033 bp-1749 bp, 1800 bp-1950 bp, or 2953 bp-3182 bp of the HBV genome with reference to the HBV genome set forth in SEQ ID NO: 650.

[0625] 35. The epigenetic-modifying DNA-targeting system of any of embodiments 1-33, wherein the target site, or each of the target sites, is positioned within a target region that has a sequence corresponding to the sequence located at base pairs between 1 bp-42 bp, 491 bp-1032 bp, 1750 bp-1799 bp, or 1951 bp-2952 bp of the HBV genome with reference to the HBV genome set forth in SEQ ID NO: 650.

[0626] 36. The epigenetic-modifying DNA-targeting system of any of embodiments 1-33, wherein the target site, or each of the target sites, is in a CpG island of the HBV genome.

[0627] 37. The epigenetic-modifying DNA-targeting system of any of embodiments 1-33 and 36, wherein the target site, or each of the target sites, is positioned within a target region that has a sequence corresponding to the sequence located at base pairs between 67 bp-392 bp, 1033 bp-1749 bp, or 2215 bp-2490 bp of the HBV genome with reference to the HBV genome set forth in SEQ ID NO: 650.

[0628] 38. The epigenetic-modifying DNA-targeting system of any of embodiments 1-33, 36 and 37, wherein the target site, or each of the target sites, is positioned within a target region that has a sequence corresponding to the sequence located at base pairs between 1033 bp-1749 bp in a Hepatitis B viral sequence with reference to nucleotide positions of SEQ ID NO: 650.

[0629] 39. The epigenetic-modifying DNA-targeting system of any of embodiments 1-37, wherein the target site, or each of the target sites, is within a target region located within 300 base pairs upstream of the hepatitis B X protein (HBx) start codon.

[0630] 40. An epigenetic-modifying DNA-targeting system comprising at least one DNA-targeting module for repressing transcription of one or more Hepatitis B viral (HBV) genes, wherein each of the at least one DNA-targeting module comprises a fusion protein comprising:
[0631] (a) a DNA-binding domain for targeting to a target site within a target region spanning within 300 base pairs upstream of the hepatitis B X protein (HBx) start codon; and
[0632] (b) at least one transcriptional repressor effector domain.

[0633] 41. The epigenetic-modifying DNA-targeting system of any of embodiments 1-40, wherein the target site, or each of the target sites, is positioned in the HBx basal core promoter region.

[0634] 42. The epigenetic-modifying DNA-targeting system of any of embodiments 1-40, wherein the target site, or each of the target sites, is positioned within the HBx promoter/Enhancer region.

[0635] 43. The epigenetic-modifying DNA-targeting system of any of embodiments 1-42, wherein the target site, or each of the target sites, is within a target region spanning within 250 base pairs upstream of the hepatitis B X protein (HBx) start codon.

[0636] 44. The epigenetic-modifying DNA-targeting system of any of embodiments 1-43, wherein the target site, or each of the target sites, is within a target region that has a sequence corresponding to the sequence located at base pairs between 1060-1480 bp of the HBV genome with reference to the HBV genome set forth in SEQ ID NO: 650.

[0637] 45. The epigenetic-modifying DNA-targeting system of any of embodiments 1-44, wherein the target site, or each of the target sites, is within a target region spanning within 150 base pairs upstream of the hepatitis B X protein (HBx) start codon.

[0638] 46. The epigenetic-modifying DNA-targeting system of any of embodiments 1-45, wherein the target site, or each of the target sites, is within a target region spanning within 120 base pairs upstream of the hepatitis B X protein (HBx) start codon.

[0639] 47. The epigenetic-modifying DNA-targeting system of any of embodiments 1-46, wherein the target site, or each of the target sites, is within a target region that has a sequence corresponding to the sequence located at base pairs between 1250-1374 bp of the HBV genome with reference to the HBV genome set forth in SEQ ID NO: 650.

[0640] 48. The epigenetic-modifying DNA-targeting system of any of embodiments 1-47, wherein the target site, or each of the target sites, is within a target region that has a sequence corresponding to the sequence located at base pairs between 1255-1302 bp of the HBV genome with reference to the HBV genome set forth in SEQ ID NO: 650.

[0641] 49. The epigenetic-modifying DNA-targeting system of any of embodiments 1-48, wherein the target site, or each of the target sites, is within a target region that has a sequence corresponding to the sequence located at base pairs between 1260-1300 bp of the HBV genome with reference to the HBV genome set forth in SEQ ID NO: 650.

[0642] 50. The epigenetic-modifying DNA-targeting system of any of embodiments 1-49, wherein the target site, or each of the target sites, is at least 70% homologous to all Hepatitis B viral genomes.

[0643] 51. The epigenetic-modifying DNA-targeting system of any of embodiments 1-50, wherein the target site, or each of the target sites, is at least 70% homologous to at least 1000 Hepatitis B viral genomes.

[0644] 52. The epigenetic-modifying DNA-targeting system of any of embodiments 1-51, wherein the target site, or each of the target sites, is at least 70% homologous to at least 1000 Hepatitis B viral genomes and comprises up to two mismatches.

[0645] 53. The epigenetic-modifying DNA-targeting system of any of embodiments 1-52, wherein the target site, or each of the target sites, comprises the sequence set forth in any one of SEQ ID NOS: 1-195, a contiguous portion thereof of at least 14 nucleotides (nt), or a complementary sequence of any of the foregoing.

[0646] 54. The epigenetic-modifying DNA-targeting system of any of embodiments 1-53, wherein the target site, or each of the target sites comprises the sequence set forth in any one of SEQ ID NOs: 175, 138, 192, 152, 118, 125, 185, 63, 116, 124, 35, 82, a contiguous portion thereof of at least 14 nucleotides (nt), or a complementary sequence of any of the foregoing.

[0647] 55. The epigenetic-modifying DNA-targeting system of any of embodiments 1-54, wherein the target site, or each of the target sites comprises the sequence set forth in any one of SEQ ID NOs: 175, 138, 192, 152, 118, 125, 185, 63, 116, 124, 35, 82.

[0648] 56. The epigenetic-modifying DNA-targeting system of any of embodiments 1-53, wherein the target site, or each of the target sites comprises the sequence set forth in any one of SEQ ID NOs: 5, 6, 12, 18, 22, 26, 29, 38, 42, 43, 51, 56, 61, 63, 68, 72, 75, 79, 82, 84, 88, 89, 98, 99, 113, 116, 121, 124, 125, 118, 130, 133, 135, 138, 143, 150, 152, 155, 158, 164, 165, 175, 176, 182, 185, 189, 190, 192, a contiguous portion thereof of at least 14 nucleotides (nt), or a complementary sequence of any of the foregoing.

[0649] 57. The epigenetic-modifying DNA-targeting system of any of embodiments 1-53 and 56, wherein the target site, or each of the target sites comprises the sequence set forth in any one of SEQ ID NOs: 5, 6, 12, 18, 22, 26, 29, 38, 42, 43, 51, 56, 61, 63, 68, 72, 75, 79, 82, 84, 88, 89, 98, 99, 113, 116, 121, 124, 125, 118, 130, 133, 135, 138, 143, 150, 152, 155, 158, 164, 165, 175, 176, 182, 185, 189, 190, 192.

[0650] 58. The epigenetic-modifying DNA-targeting system of any of embodiments 1-53 and 58, wherein the target site, or each of the target sites, is set forth in any one of SEQ ID NOS: 12, 18, 20, 22, 26, 27, 46, 50, 63, 66, 73, 79, 185, 192, a contiguous portion thereof of at least 14 nucleotides, or a complementary sequence of any of the foregoing.

[0651] 59. The epigenetic-modifying DNA-targeting system of any of embodiments 1-53 and 58, wherein the target site, or each of the target sites, is set forth in any one of SEQ ID NOS: 12, 18, 20, 22, 26, 27, 46, 50, 63, 66, 73, 79, 185, 192.

[0652] 60. The epigenetic-modifying DNA-targeting system of any of embodiments 1-53 and 56-59, wherein the target site, or each of the target sites, comprises the sequence set forth in SEQ ID NO: 22, a contiguous portion thereof of at least 14 nucleotides, or a complementary sequence of any of the foregoing, optionally wherein the target site is set forth in SEQ ID NO: 22.

[0653] 61. The epigenetic-modifying DNA-targeting system of any of embodiments 1-53 and 56-59, wherein the target site, or each of the target sites, comprises the sequence set forth in SEQ ID NO: 63, a contiguous portion thereof of at least 14 nucleotides, or a complementary sequence of any of the foregoing, optionally wherein the target site is set forth in SEQ ID NO: 63.

[0654] 62. The epigenetic-modifying DNA-targeting system of any of embodiments 2-53, wherein the gRNA, or each of the gRNA, comprises a gRNA spacer sequence comprising the sequence set forth in any one of SEQ ID NOs: 196-390.

[0655] 63. The epigenetic-modifying DNA-targeting system of embodiment 62, wherein the gRNA, or each of the gRNA further comprises the sequence set forth in SEQ ID NO: 587.

[0656] 64. The epigenetic-modifying DNA-targeting system of any of embodiments 2-53, 62 and 63, wherein the gRNA, or each of the gRNA, comprises the sequence set forth in any one of SEQ ID NOS: 391-585.

[0657] 65. The epigenetic-modifying DNA-targeting system of any of embodiments 2-53, and 62-64, wherein the gRNA, or each of the gRNA, is set forth in any one of SEQ ID NOS: 391-585.

[0658] 66. The epigenetic-modifying DNA-targeting system of any of embodiments 2-53 and 62-64, wherein the gRNA, or each of the gRNA, comprises the sequence set forth in any one of SEQ ID NOS: 370, 333, 387, 347, 313, 320, 380, 256, 258, 311, 319, 230, 272, a contiguous portion thereof of at least 14 nucleotides, or a complementary sequence of any of the foregoing, optionally wherein the gRNA, or each of the gRNA, is set forth in any one of SEQ ID NOS: 565, 528, 542, 508, 515, 575, 515, 453, 506, 514, 425, or 472.

[0659] 67. The epigenetic-modifying DNA-targeting system of any of embodiments 2-53 and 62-66, wherein the gRNA, or each of the gRNA, comprises the sequence set forth in any one of SEQ ID NOS: 370, 333, 387, 347, 313, 320, 380, 256, 258, 311, 319, 230, 272, optionally wherein the gRNA, or each of the gRNA, is set forth in any one of SEQ ID NOS: 565, 528, 542, 508, 515, 575, 515, 453, 506, 514, 425, or 472.

[0660] 68. The epigenetic-modifying DNA-targeting system of any of embodiments 2-53 and 62-65, wherein the gRNA, or each of the gRNA, comprises the sequence set forth in any one of SEQ ID NOS: 200, 201, 207, 217, 221, 224, 233, 237, 238, 246, 251, 256, 258, 263, 267, 274, 270, 277, 279, 283, 284, 293, 294, 308, 311, 313, 316, 319, 320, 325, 328, 330, 333, 338, 345, 347, 350, 353, 359, 360, 370, 371, 377, 380, 384, 385, 387, a contiguous portion thereof of at least 14 nucleotides, or a complementary sequence of any of the foregoing, optionally wherein the gRNA, or each of the gRNA, is set forth in any one of SEQ ID NOS: 395, 402, 408, 412, 416, 419, 428, 432, 433, 441, 446, 451, 453, 458, 462, 465, 469, 472, 474, 478, 479, 488, 489, 503, 506, 508, 511, 514, 515, 520, 523, 525, 575, 528, 533, 540, 542, 545, 548, 554, 555, 565, 566, 572, 579, 580, or 582.

[0661] 69. The epigenetic-modifying DNA-targeting system of any of embodiments 2-53, 62-65 and 68, wherein the gRNA, or each of the gRNA, comprises the sequence set forth in any one of SEQ ID NOS: 200, 201, 207, 217, 221, 224, 233, 237, 238, 246, 251, 256, 258, 263, 267, 274, 270, 277, 279, 283, 284, 293, 294, 308, 311, 313, 316, 319, 320, 325, 328, 330, 333, 338, 345, 347, 350, 353, 359, 360, 370, 371, 377, 380, 384, 385, or 387, optionally wherein the gRNA, or each of the gRNA, is set forth in any one of SEQ ID NOS:395, 402, 408, 412, 416, 419, 428, 432, 433, 441, 446, 451, 453, 458, 462, 465, 469, 472, 474, 478, 479, 488, 489, 503, 506, 508, 511, 514, 515, 520, 523, 525, 575, 528, 533, 540, 542, 545, 548, 554, 555, 565, 566, 572, 579, 580, or 582.

[0662] 70. The epigenetic-modifying DNA-targeting system of any of embodiments 2-53 and 62-65, wherein the gRNA, or each of the gRNA, comprises the sequence set forth in any one of SEQ ID NOS: 207, 213, 215, 217, 221, 222, 241, 245, 258, 261, 268, 274, 380, 387, a contiguous portion thereof of at least 14 nucleotides, or a complementary sequence of any of the foregoing, optionally wherein the gRNA, or each of the gRNA, is set forth in any one of SEQ ID NOS: 402, 408, 410, 412, 416, 417, 436, 440, 453, 456, 463, 469, 575, 582.

[0663] 71. The epigenetic-modifying DNA-targeting system of any of embodiments 2-53, 62-65 and 70, wherein the gRNA, or each of the gRNA, comprises the sequence set forth in any one of SEQ ID NOS: 207, 213, 215, 217, 221, 222, 241, 245, 258, 261, 268, 274, 380, 387, optionally wherein the gRNA, or each of the gRNA, is set forth in any one of SEQ ID NOS: 402, 408, 410, 412, 416, 417, 436, 440, 453, 456, 463, 469, 575, 582.

[0664] 72. The epigenetic-modifying DNA-targeting system of any of embodiments 2-53, 62-65 and 68-71, wherein the gRNA, or each of the gRNA, comprises the sequence set forth in SEQ ID NO: 217, a contiguous portion thereof of at least 14 nucleotides, or a complementary sequence of any of the foregoing, optionally wherein the gRNA, or each of the gRNA, comprises the sequence set forth in SEQ ID NO: 217, optionally wherein the gRNA, or each of the gRNA, is set forth in any one of SEQ ID NO: 412.

[0665] 73. The epigenetic-modifying DNA-targeting system of any of embodiments 2-53, 62-65 and 68-71, wherein the gRNA, or each of the gRNA, comprises the sequence set forth in SEQ ID NO: 258, a contiguous portion thereof of at least 14 nucleotides, or a complementary sequence of any of the foregoing, optionally wherein the gRNA, or each of the gRNA, comprises the sequence set forth in SEQ ID NO: 258, optionally wherein the gRNA, or each of the gRNA, is set forth in any one of SEQ ID NO: 453.

[0666] 74. The epigenetic-modifying DNA-targeting system of any of embodiments 1-73, wherein the target site, or each of the target sites, is at least 90% homologous to all Hepatitis B viral genomes.

[0667] 75. The epigenetic-modifying DNA-targeting system of any of embodiments 1-74 wherein the target site, or each of the target sites, is at least 90% homologous to at least 1000 Hepatitis B viral genomes.

[0668] 76. The epigenetic-modifying DNA-targeting system of any of embodiments 1-75, wherein the target site, or each of the target sites, is at least 90% homologous to at least 1000 Hepatitis B viral genomes and comprises up to two mismatches, optionally one or two mismatches.

[0669] 77. The epigenetic-modifying DNA-targeting system of any of embodiments 1-53, 62-65 and 74-76, wherein the target site, or each of the target sites, comprises a sequence set forth in any one of SEQ ID NOS: 35-100, a contiguous portion thereof of at least 14 nucleotides (nt), or a complementary sequence of any of the foregoing.

[0670] 78. The epigenetic-modifying DNA-targeting system of any of embodiments 2-53, 62-65 and 74-77, wherein the gRNA, or each of the gRNA, comprises a gRNA spacer sequence comprising the sequence set forth in any one of SEQ ID NOs: 230-295.

[0671] 79. The epigenetic-modifying DNA-targeting system of embodiment 78, wherein the gRNA, or each of the gRNA, further comprises the sequence set forth in SEQ ID NO: 587.

[0672] 80. The epigenetic-modifying DNA-targeting system of any of embodiments 2-53, 62-65, and 74-79, wherein the gRNA, or each of the gRNA, comprises the sequence set forth in any one of SEQ ID NOs: 230-295, optionally wherein the gRNA or each of the gRNA is set forth in any one of SEQ ID NOs: 425-490.

[0673] 81. The epigenetic-modifying DNA-targeting system of any of embodiments 52-80, wherein the up to two mismatches are located in the first 12 nt on the 5′ end of the gRNA protospacer.

[0674] 82. The epigenetic-modifying DNA-targeting system of any of embodiments 1-51 and 53-73, 75, and 77-81, wherein the target site, or each of the target sites, is at least 90% homologous to at least 1000 Hepatitis B viral genomes and comprises zero mismatches.

[0675] 83. The epigenetic-modifying DNA-targeting system of any of embodiments 1-53, 62-65, 74-76 and 82, wherein the target site comprises the sequence set forth in any one of SEQ ID NOS: 1-34, a contiguous portion thereof of at least 14 nucleotides (nt), or a complementary sequence of any of the foregoing.

[0676] 84. The epigenetic-modifying DNA-targeting system of any of embodiments 2-53, 62-65, 74-76, 82 and 83, wherein the gRNA, or each of the gRNA, comprises a gRNA spacer sequence comprising the sequence set forth in SEQ ID NO: 196-229.

[0677] 85. The epigenetic-modifying DNA-targeting system of any of embodiments 62-84, wherein the gRNA spacer sequence is between 14 nt and 24 nt, or between 16 nt and 22 nt in length.

[0678] 86. The epigenetic-modifying DNA-targeting system of any of embodiments 62-85, wherein the gRNA spacer sequence is 18 nt, 19 nt, 20 nt, 21 nt or 22 nt in length.

[0679] 87. The epigenetic-modifying DNA-targeting system of any of embodiments 62-86, wherein the gRNA spacer sequence comprises modified nucleotides for increased stability.

[0680] 88. The epigenetic-modifying DNA-targeting system of any of embodiments 2-53, 62, 74-76, and 82-87, wherein the at least one gRNA further comprises the sequence set forth in SEQ ID NO: 587.

[0681] 89. The epigenetic-modifying DNA-targeting system of any of embodiments 2-53, 62, 74-76, and 82-88, wherein the gRNA, or each of the gRNA, comprises the sequence set forth in any one of SEQ ID NOS: 196-229, optionally wherein the gRNA, or each of the gRNA, is set forth in any one of SEQ ID NOS: 391-424.

[0682] 90. The epigenetic-modifying DNA-targeting system of any of embodiments 2-53, 62, 74-76 and 82-89, wherein the gRNA, or each of the gRNA, comprises the sequence set forth in any one of SEQ ID NOS: 207, 213, 215, 217, 221, 222, 241, 245, 258, 261, 268, 274, 380, 387, optionally wherein the gRNA, or each of the gRNA, is set forth in any one of SEQ ID NOS: 402, 408, 410, 412, 416, 417, 436, 440, 453, 456, 463, 469, 575, 582.

[0683] 91. The epigenetic-modifying DNA-targeting system of any of embodiments 2-53, 62, 74-76 and 82-90, wherein the gRNA comprises the sequence set forth in SEQ ID NO: 217, optionally wherein the gRNA, is set forth in SEQ ID NO: 412.

[0684] 92. The epigenetic-modifying DNA-targeting system of any one of embodiments 2-91, wherein the Cas protein or a variant thereof is a Cas9 protein or a variant thereof.

[0685] 93. The epigenetic-modifying DNA-targeting system of any one of embodiments 2-92, wherein the Cas protein or a variant thereof is a Cas12 protein or a variant thereof.

[0686] 94. The epigenetic-modifying DNA-targeting system of any one of embodiments 2-93, wherein the Cas protein or a variant thereof is a variant Cas protein, wherein the variant Cas protein lacks nuclease activity or is a deactivated Cas (dCas) protein.

[0687] 95. The epigenetic-modifying DNA-targeting system of any one of embodiments 2-94, wherein the variant Cas protein is a variant Cas9 protein that lacks nuclease activity or that is a deactivated Cas9 (dCas9) protein.

[0688] 96. The epigenetic-modifying DNA-targeting system of any one of embodiments 2-95, wherein the Cas9 protein or a variant thereof is a Staphylococcus aureus Cas9 (SaCas9) protein or a variant thereof.

[0689] 97. The epigenetic-modifying DNA-targeting system of embodiment %, wherein the variant Cas9 is a Staphylococcus aureus dCas9 protein (dSaCas9) that comprises at least one amino acid mutation selected from D10A and N580A, with reference to numbering of positions of SEQ ID NO: 5%.

[0690] 98. The epigenetic-modifying DNA-targeting system of embodiment % or 97, wherein the variant Cas9 protein comprises the sequence set forth in SEQ ID NO: 597, or an amino acid sequence that has at least 90%, 91%, 92%, 93%, 94%, 95%, 96%, 97%, 98%, or 99% sequence identity to SEQ ID NO: 597.

[0691] 99. The epigenetic-modifying DNA-targeting system of any one of embodiments 2-95, wherein the Cas9 protein or a variant thereof is a Streptococcus pyogenes Cas9 (SpCas9) protein or a variant thereof.

[0692] 100. The epigenetic-modifying DNA-targeting system of embodiment 99, wherein the variant Cas9 is a Streptococcus pyogenes dCas9 (dSpCas9) protein that comprises at least one amino acid mutation selected from D10A and H840A, with reference to numbering of positions of SEQ ID NO: 598.

[0693] 101. The epigenetic-modifying DNA-targeting system of embodiment 99 or 100, wherein the variant Cas9 protein comprises the sequence set forth in SEQ ID NO:599 or an amino acid sequence that has at least 90%, 91%, 92%, 93%, 94%, 95%, 96%, 97%, 98%, or 99% sequence identity thereto.

[0694] 102. The epigenetic-modifying DNA-targeting system of any of embodiments 1-5, 11-18, 20-33, 34-61, wherein the at least one DNA-binding domain comprises an engineered zinc finger protein (eZFP).

[0695] 103. The epigenetic-modifying DNA-targeting system of any of embodiments 1-5, 11-18, 20-33, 34-61 and 102, wherein the at least one DNA-binding domain is an eZFP.

[0696] 104. The epigenetic-modifying DNA-targeting system of any of embodiments 1-54, 11-18, 20-33, 34-61, 102 and 103, wherein the target site comprises the nucleotide sequence set forth in any one of SEQ ID NOS: 1045, 1046, 1052, a contiguous portion thereof of at least 12 nt, or a complementary sequence of any of the foregoing.

[0697] 105. The epigenetic-modifying DNA-targeting system of any of embodiments 1-54, 11-18, 20-33, 34-61 and 102-104, wherein the target site comprises the nucleotide sequence set forth in any one of SEQ ID NOS: 1045, 1046, 1052.

[0698] 106. The epigenetic-modifying DNA-targeting system of any of embodiments 102-105, wherein the zinc finger protein comprises six zinc fingers denoted F1 through F6 in order from N-terminus to C-terminus,

and wherein the amino acid sequence of each zinc finger recognition region is as follows:

1)
F1:
(SEQ ID NO: 720)
SEADRSR
F2:
(SEQ ID NO: 721)
DRSNLTR
F3:
(SEQ ID NO: 722)
QSSDLSR
F4:
(SEQ ID NO: 723)
YHWYLKK
F5:
(SEQ ID NO: 724)
RSDSLSV
F6:
(SEQ ID NO: 725)
QNANRKT;
2)
F1:
(SEQ ID NO: 726)
RSDVLST
F2:
(SEQ ID NO: 727)
DNSSRTR
F3:
(SEQ ID NO: 728)
RPYTLRL
F4:
(SEQ ID NO: 729)
DSSHRTR
F5:
(SEQ ID NO: 730)
RSDHLSQ
F6:
(SEQ ID NO: 731)
DSSHRTR;
3)
F1:
(SEQ ID NO: 732)
RSDHLSQ
F2:
(SEQ ID NO: 733)
QSADRTK
F3:
(SEQ ID NO: 734)
RSDHLSQ
F4:
(SEQ ID NO: 735)
RRSDLKR
F5:
(SEQ ID NO: 736)
RSDHLSR
F6:
(SEQ ID NO: 737)
QSSDLRR;
4)
F1:
(SEQ ID NO: 738)
RSDNLSE
F2:
(SEQ ID NO: 739)
TSSNRKT
F3:
(SEQ ID NO: 740)
DRSHLTR
F4:
(SEQ ID NO: 741)
RSDALTQ
F5:
(SEQ ID NO: 742)
DRSALAR
F6:
(SEQ ID NO: 743)
RRFTLSK;
5)
F1:
(SEQ ID NO: 744)
RSDHLSE
F2:
(SEQ ID NO: 745)
QYSGRYY
F3:
(SEQ ID NO: 746)
HGQTLNE
F4:
(SEQ ID NO: 747)
QSGNLAR
F5:
(SEQ ID NO: 748)
RSDSLLR
F6:
(SEQ ID NO: 749)
CREYRGK;
6)
F1:
(SEQ ID NO: 750)
QSANRTT
F2:
(SEQ ID NO: 751)
RSANLTR
F3:
(SEQ ID NO: 752)
RSDVLSE
F4:
(SEQ ID NO: 753)
TSGHLSR
F5:
(SEQ ID NO: 754)
QSSDLSR,
F6:
(SEQ ID NO: 755)
QWSTRKR;
7)
F1:
(SEQ ID NO: 756)
QSGNLAR
F2:
(SEQ ID NO: 757)
ATCCLAH
F3:
(SEQ ID NO: 758)
RWQYLPT
F4:
(SEQ ID NO: 759)
DRSALAR
F5:
(SEQ ID NO: 760)
RSDNLSE
F6:
(SEQ ID NO: 761)
KRCNLRC;
8)
F1:
(SEQ ID NO: 762)
NPANLTR
F2:
(SEQ ID NO: 763)
QNATRTK
F3:
(SEQ ID NO: 764)
QSGHLAR
F4:
(SEQ ID NO: 765)
NRHDRAK
F5:
(SEQ ID NO: 766)
RSDHLSE,
F6:
(SEQ ID NO: 767)
QRRSRYK;
9)
F1:
(SEQ ID NO: 768)
QSSDLSR
F2:
(SEQ ID NO: 769)
HRSTRNR
F3:
(SEQ ID NO: 770)
RSDVLSA
F4:
(SEQ ID NO: 771)
DSRTRKN
F5:
(SEQ ID NO: 772)
QSGSLTR
F6:
(SEQ ID NO: 773)
DQSGLAH;
10)
F1:
(SEQ ID NO: 774)
QNPAQWR
F2:
(SEQ ID NO: 775)
RSADLSR
F3:
(SEQ ID NO: 776)
TSGSLSR
F4:
(SEQ ID NO: 777)
RSDHLSR
F5:
(SEQ ID NO: 778)
RSDSLLR
F6:
(SEQ ID NO: 779)
QSYDRFQ;
11)
F1:
(SEQ ID NO: 780)
TSGSLSR
F2:
(SEQ ID NO: 781)
RSDHLSR
F3:
(SEQ ID NO: 782)
RSDSLLR
F4:
(SEQ ID NO: 783)
QSYDRFQ
F5:
(SEQ ID NO: 784)
RSDNLST
F6:
(SEQ ID NO: 785)
DNRDRIK;
12)
F1:
(SEQ ID NO: 786)
DRSNLSR
F2:
(SEQ ID NO: 787)
LRQNLIM
F3:
(SEQ ID NO: 788)
ERGTLAR
F4:
(SEQ ID NO: 789)
RSDALTQ
F5:
(SEQ ID NO: 790)
RSDSLSQ
F6:
(SEQ ID NO: 791)
RKADRTR;
13)
F1:
(SEQ ID NO: 792)
QYCCLTN
F2:
(SEQ ID NO: 793)
TSGNLTR
F3:
(SEQ ID NO: 794)
QSSDLSR
F4:
(SEQ ID NO: 795)
FRYYLKR
F5:
(SEQ ID NO: 796)
QSGDLTR
F6:
(SEQ ID NO: 797)
DKGNLTK;
14)
F1:
(SEQ ID NO: 798)
TSGSLSR
F2:
(SEQ ID NO: 799)
RSDNLTT
F3:
(SEQ ID NO: 800)
QSGNLAR
F4:
(SEQ ID NO: 801)
DRTTLMR
F5:
(SEQ ID NO: 802)
QSGHLAR
F6:
(SEQ ID NO: 803)
QLTHLNS;
15)
F1:
(SEQ ID NO: 804)
IKHDLHR
F2:
(SEQ ID NO: 805)
RSANLTR
F3:
(SEQ ID NO: 806)
RSDNLAR
F4:
(SEQ ID NO: 807)
QNVSRPR
F5:
(SEQ ID NO: 808)
RSDDLSK
F6:
(SEQ ID NO: 809)
DSSHRTR;
16)
F1:
(SEQ ID NO: 810)
RSDNLAR
F2:
(SEQ ID NO: 811)
QNVSRPR
F3:
(SEQ ID NO: 812)
RSDDLSK
F4:
(SEQ ID NO: 813)
DSSHRTR
F5:
(SEQ ID NO: 814)
TSSNRKT
F6:
(SEQ ID NO: 815)
AQWTRAC;
17)
F1:
(SEQ ID NO: 816)
RSDDLSK
F2:
(SEQ ID NO: 817)
DSSHRTR
F3:
(SEQ ID NO: 818)
TSSNRKT
F4:
(SEQ ID NO: 819)
AQWTRAC
F5:
(SEQ ID NO: 820)
RKQTRTT
F6:
(SEQ ID NO: 821)
HRSSLRR;
18)
F1:
(SEQ ID NO: 822)
QSAHRKN
F2:
(SEQ ID NO: 823)
TSSNRKT
F3:
(SEQ ID NO: 824)
RSDNLSA
F4:
(SEQ ID NO: 825)
RNNDRKT
F5:
(SEQ ID NO: 826)
TSGSLSR
F6:
(SEQ ID NO: 827)
QAGHLAK;
19)
F1:
(SEQ ID NO: 828)
RSDHLSQ
F2:
(SEQ ID NO: 829)
ASSTRTK
F3:
(SEQ ID NO: 830)
RSDDLTR
F4:
(SEQ ID NO: 831)
QKSNLSS
F5:
(SEQ ID NO: 832)
QSANRTT
F6:
(SEQ ID NO: 833)
QNATRTK;
20)
F1:
(SEQ ID NO: 834)
RSDTLSE
F2:
(SEQ ID NO: 835)
RRWTLVG
F3:
(SEQ ID NO: 836)
DRSNLSR
F4:
(SEQ ID NO: 837)
QSGDLTR
F5:
(SEQ ID NO: 838)
QSSDLSR
F6:
(SEQ ID NO: 839)
YHWYLKK;
21)
F1:
(SEQ ID NO: 840)
RSANLAR
F2:
(SEQ ID NO: 841)
RSDNLRE
F3:
(SEQ ID NO: 842)
RPYTLRL
F4:
(SEQ ID NO: 843)
HRSNLNK
F5:
(SEQ ID NO: 844)
QSGSLTR
F6:
(SEQ ID NO: 845)
TSANLSR;
22)
F1:
(SEQ ID NO: 846)
RSDDLVR
F2:
(SEQ ID NO: 847)
TSGSLVR
F3:
(SEQ ID NO: 848)
RSDKLVR
F4:
(SEQ ID NO: 849)
RSDELVR
F5:
(SEQ ID NO: 850)
TSHSLTE
F6:
(SEQ ID NO: 851)
RADNLTE;
23)
F1:
(SEQ ID NO: 852)
ERSHLRE
F2:
(SEQ ID NO: 853)
TSHSLTE
F3:
(SEQ ID NO: 854)
QAGHLAS
F4:
(SEQ ID NO: 855)
TSHSLTE
F5:
(SEQ ID NO: 856)
DPGHLVR
F6:
(SEQ ID NO: 857)
TSGNLVR;
24)
F1:
(SEQ ID NO: 858)
RADNLTE
F2:
(SEQ ID NO: 859)
TSGSLVR
F3:
(SEQ ID NO: 860)
RKDNLKN
F4:
(SEQ ID NO: 861)
QSSSLVR
F5:
(SEQ ID NO: 862)
RSDKLVR
F6:
(SEQ ID NO: 863)
DSGNLRV;
25)
F1:
(SEQ ID NO: 864)
QSSSLVR
F2:
(SEQ ID NO: 865)
QSGDLRR
F3:
(SEQ ID NO: 866)
RSDERKR
F4:
(SEQ ID NO: 867)
HRTTLTN
F5:
(SEQ ID NO: 868)
RSDHLTN
F6:
(SEQ ID NO: 869)
TSGELVR;
26)
F1:
(SEQ ID NO: 870)
QSGDLRR
F2:
(SEQ ID NO: 871)
RSDERKR
F3:
(SEQ ID NO: 872)
HRTTLTN
F4:
(SEQ ID NO: 873)
RSDHLTN
F5:
(SEQ ID NO: 874)
TSGELVR
F6:
(SEQ ID NO: 875)
RSDDLVR;
27)
F1:
(SEQ ID NO: 876)
QRAHLER
F2:
(SEQ ID NO: 877)
QLAHLRA
F3:
(SEQ ID NO: 878)
DPGHLVR
F4:
(SEQ ID NO: 879)
RRSACRR
F5:
(SEQ ID NO: 880)
RSDHLTT
F6:
(SEQ ID NO: 881)
QSSSLVR;
and
28)
F1:
(SEQ ID NO: 882)
QSSNLVR
F2:
(SEQ ID NO: 883)
RSDDLVR
F3:
(SEQ ID NO: 884)
THLDLIR
F4:
(SEQ ID NO: 885)
TSGNLTE
F5:
(SEQ ID NO: 886)
RRSACRR
F6:
(SEQ ID NO: 887)
RNDTLTE.

[0699] 107. The epigenetic-modifying DNA-targeting system of any of embodiments 102-106, wherein the zinc finger protein comprises six zinc fingers denoted F1 through F6 in order from N-terminus to C-terminus,

and wherein the amino acid sequence of each zinc finger recognition region is as follows:

F1:
(SEQ ID NO: 822)
QSAHRKN
F2:
(SEQ ID NO: 823)
TSSNRKT
F3:
(SEQ ID NO: 824)
RSDNLSA
F4:
(SEQ ID NO: 825)
RNNDRKT
F5:
(SEQ ID NO: 826)
TSGSLSR
F6:
(SEQ ID NO: 827)
QAGHLAK

[0700] 108. The epigenetic-modifying DNA-targeting system of any of embodiments 102-106, wherein the zinc finger protein comprises six zinc fingers denoted F1 through F6 in order from N-terminus to C-terminus,

and wherein the amino acid sequence of each zinc finger recognition region is as follows:

F1:
(SEQ ID NO: 828)
RSDHLSQ
F2:
(SEQ ID NO: 829)
ASSTRTK
F3:
(SEQ ID NO: 830)
RSDDLTR
F4:
(SEQ ID NO: 831)
QKSNLSS
F5:
(SEQ ID NO: 832)
QSANRTT
F6:
(SEQ ID NO: 833)
QNATRTK

[0701] 109. The epigenetic-modifying DNA-targeting system of any of embodiments 102-106, wherein the zinc finger protein comprises six zinc fingers denoted F1 through F6 in order from N-terminus to C-terminus,

and wherein the amino acid sequence of each zinc finger recognition region is as follows:

F1:
(SEQ ID NO: 864)
QSSSLVR
F2:
(SEQ ID NO: 865)
QSGDLRR
F3:
(SEQ ID NO: 866)
RSDERKR
F4:
(SEQ ID NO: 867)
HRTTLTN
F5:
(SEQ ID NO: 868)
RSDHLTN
F6:
(SEQ ID NO: 869)
TSGELVR.

[0702] 110. An epigenetic-modifying DNA-targeting system comprising: a) an eZFP that binds to a target site in one or more HBV genes or regulatory elements thereof and b) at least one effector domain that represses transcription of one or more HBV genes, wherein the zinc finger protein comprises six zinc fingers denoted F1 through F6 in order from N-terminus to C-terminus, and wherein the amino acid sequence of each zinc finger recognition region is as follows:

1)
F1:
(SEQ ID NO: 720)
SEADRSR
F2:
(SEQ ID NO: 721)
DRSNLTR
F3:
(SEQ ID NO: 722)
QSSDLSR
F4:
(SEQ ID NO: 723)
YHWYLKK
F5:
(SEQ ID NO: 724)
RSDSLSV
F6:
(SEQ ID NO: 725)
QNANRKT;
2)
F1:
(SEQ ID NO: 726)
RSDVLST
F2:
(SEQ ID NO: 727)
DNSSRTR
F3:
(SEQ ID NO: 728)
RPYTLRL
F4:
(SEQ ID NO: 729)
DSSHRTR
F5:
(SEQ ID NO: 730)
RSDHLSQ
F6:
(SEQ ID NO: 731)
DSSHRTR;
3)
F1:
(SEQ ID NO: 732)
RSDHLSQ
F2:
(SEQ ID NO: 733)
QSADRTK
F3:
(SEQ ID NO: 734)
RSDHLSQ
F4:
(SEQ ID NO: 735)
RRSDLKR
F5:
(SEQ ID NO: 736)
RSDHLSR
F6:
(SEQ ID NO: 737)
QSSDLRR;
4)
F1:
(SEQ ID NO: 738)
RSDNLSE
F2:
(SEQ ID NO: 739)
TSSNRKT
F3:
(SEQ ID NO: 740)
DRSHLTR
F4:
(SEQ ID NO: 741)
RSDALTQ
F5:
(SEQ ID NO: 742)
DRSALAR
F6:
(SEQ ID NO: 743)
RRFTLSK;
5)
F1:
(SEQ ID NO: 744)
RSDHLSE
F2:
(SEQ ID NO: 745)
QYSGRYY
F3:
(SEQ ID NO: 746)
HGQTLNE
F4:
(SEQ ID NO: 747)
QSGNLAR
F5:
(SEQ ID NO: 748)
RSDSLLR
F6:
(SEQ ID NO: 749)
CREYRGK;
6)
F1:
(SEQ ID NO: 750)
QSANRTT
F2:
(SEQ ID NO: 751)
RSANLTR
F3:
(SEQ ID NO: 752)
RSDVLSE
F4:
(SEQ ID NO: 753)
TSGHLSR
F5:
(SEQ ID NO: 754)
QSSDLSR,
F6:
(SEQ ID NO: 755)
QWSTRKR;
7)
F1:
(SEQ ID NO: 756)
QSGNLAR
F2:
(SEQ ID NO: 757)
ATCCLAH
F3:
(SEQ ID NO: 758)
RWQYLPT
F4:
(SEQ ID NO: 759)
DRSALAR
F5:
(SEQ ID NO: 760)
RSDNLSE
F6:
(SEQ ID NO: 761)
KRCNLRC;
8)
F1:
(SEQ ID NO: 762)
NPANLTR
F2:
(SEQ ID NO: 763)
QNATRTK
F3:
(SEQ ID NO: 764)
QSGHLAR
F4:
(SEQ ID NO: 765)
NRHDRAK
F5:
(SEQ ID NO: 766)
RSDHLSE,
F6:
(SEQ ID NO: 767)
QRRSRYK;
9)
F1:
(SEQ ID NO: 768)
QSSDLSR
F2:
(SEQ ID NO: 769)
HRSTRNR
F3:
(SEQ ID NO: 770)
RSDVLSA
F4:
(SEQ ID NO: 771)
DSRTRKN
F5:
(SEQ ID NO: 772)
QSGSLTR
F6:
(SEQ ID NO: 773)
DQSGLAH;
10)
F1:
(SEQ ID NO: 774)
QNPAQWR
F2:
(SEQ ID NO: 775)
RSADLSR
F3:
(SEQ ID NO: 776)
TSGSLSR
F4:
(SEQ ID NO: 777)
RSDHLSR
F5:
(SEQ ID NO: 778)
RSDSLLR
F6:
(SEQ ID NO: 779)
QSYDRFQ;
11)
F1:
(SEQ ID NO: 780)
TSGSLSR
F2:
(SEQ ID NO: 781)
RSDHLSR
F3:
(SEQ ID NO: 782)
RSDSLLR
F4:
(SEQ ID NO: 783)
QSYDRFQ
F5:
(SEQ ID NO: 784)
RSDNLST
F6:
(SEQ ID NO: 785)
DNRDRIK;
12)
F1:
(SEQ ID NO: 786)
DRSNLSR
F2:
(SEQ ID NO: 787)
LRQNLIM
F3:
(SEQ ID NO: 788)
ERGTLAR
F4:
(SEQ ID NO: 789)
RSDALTQ
F5:
(SEQ ID NO: 790)
RSDSLSQ
F6:
(SEQ ID NO: 791)
RKADRTR;
13)
F1:
(SEQ ID NO: 792)
QYCCLTN
F2:
(SEQ ID NO: 793)
TSGNLTR
F3:
(SEQ ID NO: 794)
QSSDLSR
F4:
(SEQ ID NO: 795)
FRYYLKR
F5:
(SEQ ID NO: 796)
QSGDLTR
F6:
(SEQ ID NO: 797)
DKGNLTK;
14)
F1:
(SEQ ID NO: 798)
TSGSLSR
F2:
(SEQ ID NO: 799)
RSDNLTT
F3:
(SEQ ID NO: 800)
QSGNLAR
F4:
(SEQ ID NO: 801)
DRTTLMR
F5:
(SEQ ID NO: 802)
QSGHLAR
F6:
(SEQ ID NO: 803)
QLTHLNS;
15)
F1:
(SEQ ID NO: 804)
IKHDLHR
F2:
(SEQ ID NO: 805)
RSANLTR
F3:
(SEQ ID NO: 806)
RSDNLAR
F4:
(SEQ ID NO: 807)
QNVSRPR
F5:
(SEQ ID NO: 808)
RSDDLSK
F6:
(SEQ ID NO: 809)
DSSHRTR;
16)
F1:
(SEQ ID NO: 810)
RSDNLAR
F2:
(SEQ ID NO: 811)
QNVSRPR
F3:
(SEQ ID NO: 812)
RSDDLSK
F4:
(SEQ ID NO: 813)
DSSHRTR
F5:
(SEQ ID NO: 814)
TSSNRKT
F6:
(SEQ ID NO: 815)
AQWTRAC;
17)
F1:
(SEQ ID NO: 816)
RSDDLSK
F2:
(SEQ ID NO: 817)
DSSHRTR
F3:
(SEQ ID NO: 818)
TSSNRKT
F4:
(SEQ ID NO: 819)
AQWTRAC
F5:
(SEQ ID NO: 820)
RKQTRTT
F6:
(SEQ ID NO: 821)
HRSSLRR;
18)
F1:
(SEQ ID NO: 822)
QSAHRKN
F2:
(SEQ ID NO: 823)
TSSNRKT
F3:
(SEQ ID NO: 824)
RSDNLSA
F4:
(SEQ ID NO: 825)
RNNDRKT
F5:
(SEQ ID NO: 826)
TSGSLSR
F6:
(SEQ ID NO: 827)
QAGHLAK;
19)
F1:
(SEQ ID NO: 828)
RSDHLSQ
F2:
(SEQ ID NO: 829)
ASSTRTK
F3:
(SEQ ID NO: 830)
RSDDLTR
F4:
(SEQ ID NO: 831)
QKSNLSS
F5:
(SEQ ID NO: 832)
QSANRTT
F6:
(SEQ ID NO: 833)
QNATRTK;
20)
F1:
(SEQ ID NO: 834)
RSDTLSE
F2:
(SEQ ID NO: 835)
RRWTLVG
F3:
(SEQ ID NO: 836)
DRSNLSR
F4:
(SEQ ID NO: 837)
QSGDLTR
F5:
(SEQ ID NO: 838)
QSSDLSR
F6:
(SEQ ID NO: 839)
YHWYLKK;
21)
F1:
(SEQ ID NO: 840)
RSANLAR
F2:
(SEQ ID NO: 841)
RSDNLRE
F3:
(SEQ ID NO: 842)
RPYTLRL
F4:
(SEQ ID NO: 843)
HRSNLNK
F5:
(SEQ ID NO: 844)
QSGSLTR
F6:
(SEQ ID NO: 845)
TSANLSR;
22)
F1:
(SEQ ID NO: 846)
RSDDLVR
F2:
(SEQ ID NO: 847)
TSGSLVR
F3:
(SEQ ID NO: 848)
RSDKLVR
F4:
(SEQ ID NO: 849)
RSDELVR
F5:
(SEQ ID NO: 850)
TSHSLTE
F6:
(SEQ ID NO: 851)
RADNLTE;
23)
F1:
(SEQ ID NO: 852)
ERSHLRE
F2:
(SEQ ID NO: 853)
TSHSLTE
F3:
(SEQ ID NO: 854)
QAGHLAS
F4:
(SEQ ID NO: 855)
TSHSLTE
F5:
(SEQ ID NO: 856)
DPGHLVR
F6:
(SEQ ID NO: 857)
TSGNLVR;
24)
F1:
(SEQ ID NO: 858)
RADNLTE
F2:
(SEQ ID NO: 859)
TSGSLVR
F3:
(SEQ ID NO: 860)
RKDNLKN
F4:
(SEQ ID NO: 861)
QSSSLVR
F5:
(SEQ ID NO: 862)
RSDKLVR
F6:
(SEQ ID NO: 863)
DSGNLRV;
25)
F1:
(SEQ ID NO: 864)
QSSSLVR
F2:
(SEQ ID NO: 865)
QSGDLRR
F3:
(SEQ ID NO: 866)
RSDERKR
F4:
(SEQ ID NO: 867)
HRTTLTN
F5:
(SEQ ID NO: 868)
RSDHLTN
F6:
(SEQ ID NO: 869)
TSGELVR;
26)
F1:
(SEQ ID NO: 870)
QSGDLRR
F2:
(SEQ ID NO: 871)
RSDERKR
F3:
(SEQ ID NO: 872)
HRTTLTN
F4:
(SEQ ID NO: 873)
RSDHLTN
F5:
(SEQ ID NO: 874)
TSGELVR
F6:
(SEQ ID NO: 875)
RSDDLVR;
27)
F1:
(SEQ ID NO: 876)
QRAHLER
F2:
(SEQ ID NO: 877)
QLAHLRA
F3:
(SEQ ID NO: 878)
DPGHLVR
F4:
(SEQ ID NO: 879)
RRSACRR
F5:
(SEQ ID NO: 880)
RSDHLTT
F6:
(SEQ ID NO: 881)
QSSSLVR;
and
28)
F1:
(SEQ ID NO: 882)
QSSNLVR
F2:
(SEQ ID NO: 883)
RSDDLVR
F3:
(SEQ ID NO: 884)
THLDLIR
F4:
(SEQ ID NO: 885)
TSGNLTE
F5:
(SEQ ID NO: 886)
RRSACRR
F6:
(SEQ ID NO: 887)
RNDTLTE.

[0703] 111. The epigenetic-modifying DNA-targeting system of any of embodiments 102-110, wherein the engineered zinc finger protein comprises the sequence set forth in any one of SEQ ID NOS: 692-719, or a portion thereof, or an amino acid sequence that has at least 90%, 91%, 92%, 93%, 94%, 95%, 96%, 97%, 98%, or 99% sequence identity thereto.

[0704] 112. The epigenetic-modifying DNA-targeting system of any of embodiments 102-111, wherein the engineered zinc finger protein is encoded by the sequence set forth in any one of SEQ ID NOS:888-915, or a portion thereof, or nucleotide sequence that has at least 90%, 91%, 92%, 93%, 94%, 95%, 96%, 97%, 98%, or 99% sequence identity thereto.

[0705] 113. An epigenetic-modifying DNA-targeting system comprising: a) an engineered zinc finger protein that binds to a target site in one or more HBV genes or regulatory elements thereof, and b) at least one effector domain that represses transcription of one or more HBV genes, wherein the zinc finger protein comprises six zinc fingers denoted F1 through F6 in order from N-terminus to C-terminus,

and wherein the amino acid sequence of each zinc finger recognition region is as follows:

F1:
(SEQ ID NO: 822)
QSAHRKN
F2:
(SEQ ID NO: 823)
TSSNRKT
F3:
(SEQ ID NO: 824)
RSDNLSA
F4:
(SEQ ID NO: 825)
RNNDRKT
F5:
(SEQ ID NO: 826)
TSGSLSR
F6:
(SEQ ID NO: 827)
QAGHLAK.

[0706] 114. The epigenetic-modifying DNA-targeting system of any of embodiments 102-113, PGP-35.DNA wherein the eZFP comprises the sequence set forth in SEQ ID NO: 709, or a portion thereof, or an amino acid sequence that has at least 90%, 91%, 92%, 93%, 94%, 95%, 96%, 97%, 98%, or 99% sequence identity thereto.

[0707] 115. The epigenetic-modifying DNA-targeting system of any of embodiments 102-114, wherein the engineered zinc finger protein comprises the sequence set forth in any one of SEQ ID NOS: 709.

[0708] 116. The epigenetic-modifying DNA-targeting system of any of embodiment 102-115, wherein the engineered zinc finger protein is encoded by the sequence set forth in SEQ ID NO:905, or a portion thereof, or nucleotide sequence that has at least 90%, 91%, 92%, 93%, 94%, 95%, 96%, 97%, 98%, or 99% sequence identity thereto.

[0709] 117. The epigenetic-modifying DNA-targeting system of any of embodiments 102-116, wherein the engineered zinc finger protein is encoded by the sequence set forth in any one of SEQ ID NOS:905.

[0710] 118. An epigenetic-modifying DNA-targeting system comprising: a) an engineered zinc finger protein that binds to a target site in one or more HBV genes or regulatory elements thereof, and b) at least one effector domain that represses transcription of one or more HBV genes,
[0711] wherein the zinc finger protein comprises six zinc fingers denoted F1 through F6 in order from N-terminus to C-terminus, and wherein the amino acid sequence of each zinc finger recognition region is as follows:

F1:
(SEQ ID NO: 828)
RSDHLSQ
F2:
(SEQ ID NO: 829)
ASSTRTK
F3:
(SEQ ID NO: 830)
RSDDLTR
F4:
(SEQ ID NO: 831)
QKSNLSS
F5:
(SEQ ID NO: 832)
QSANRTT
F6:
(SEQ ID NO: 833)
QNATRTK.

[0712] 119. The epigenetic-modifying DNA-targeting system of any of embodiments 102-112 and 118, wherein the engineered zinc finger protein comprises the sequence set forth in SEQ ID NO: 710, or a portion thereof, or an amino acid sequence that has at least 90%, 91%, 92%, 93%, 94%, 95%, 96%, 97%, 98%, or 99% sequence identity thereto.

[0713] 120. The epigenetic-modifying DNA-targeting system of any of embodiments 102-112, 118 or 119, wherein the engineered zinc finger protein comprises the sequence set forth in any one of SEQ ID NOS: 710.

[0714] 121. The epigenetic-modifying DNA-targeting system of embodiments 102-112 and 118-120, wherein the engineered zinc finger protein is encoded by the sequence set forth in SEQ ID NO:906, or a portion thereof, or nucleotide sequence that has at least 90%, 91%, 92%, 93%, 94%, 95%, 96%, 97%, 98%, or 99% sequence identity thereto.

[0715] 122. The epigenetic-modifying DNA-targeting system of any of embodiments 102-112 and 118-121, wherein the engineered zinc finger protein is encoded by the sequence set forth in any one of SEQ ID NOS: 906.

[0716] 123. An epigenetic-modifying DNA-targeting system comprising: a) an engineered zinc finger protein that binds to a target site in one or more HBV genes or regulatory elements thereof, and b) at least one effector domain that represses transcription of one or more HBV genes,
[0717] wherein the zinc finger protein comprises six zinc fingers denoted F1 through F6 in order from N-terminus to C-terminus,
   and wherein the amino acid sequence of each zinc finger recognition region is as follows:

F1:
(SEQ ID NO: 864)
QSSSLVR
F2:
(SEQ ID NO: 865)
QSGDLRR
F3:
(SEQ ID NO: 866)
RSDERKR
F4:
(SEQ ID NO: 867)
HRTTLTN
F5:
(SEQ ID NO: 868)
RSDHLTN
F6:
(SEQ ID NO: 869)
TSGELVR.

[0718] 124. The epigenetic-modifying DNA-targeting system of any of embodiments 102-112 and 123, wherein the engineered zinc finger protein comprises the sequence set forth in SEQ ID NO: 716, or a portion thereof, or an amino acid sequence that has at least 90%, 91%, 92%, 93%, 94%, 95%, 96%, 97%, 98%, or 99% sequence identity thereto.

[0719] 125. The epigenetic-modifying DNA-targeting system of any of embodiments 102-112, 123 or 124, wherein the engineered zinc finger protein comprises the sequence set forth in any one of SEQ ID NOS: 716.

[0720] 126. The epigenetic-modifying DNA-targeting system of any of embodiments 102-112 and 123-125, wherein the engineered zinc finger protein is encoded by the sequence set forth in SEQ ID NO:912, or a portion thereof, or nucleotide sequence that has at least 90%, 91%, 92%, 93%, 94%, 95%, 96%, 97%, 98%, or 99% sequence identity thereto.

[0721] 127. The epigenetic-modifying DNA-targeting system of any of embodiments 102-112 and 123-126, wherein the engineered zinc finger protein is encoded by the sequence set forth in any one of SEQ ID NOS:912.

[0722] 128. The epigenetic-modifying DNA-targeting system of any of embodiments 1-127, wherein the at least one effector domain induces transcription repression.

[0723] 129. The epigenetic-modifying DNA-targeting system of any of embodiment 1-128, wherein the at least one effector domain is a DNA methyltransferase.

[0724] 130. The epigenetic modifying DNA-targeting system of any of embodiments 1-129, wherein the at least one effector domain comprises a DNA methyltransferase and a repressor domain capable of recruiting heterochromatin inducing factors or optionally wherein the heterochromatin inducing factors include a histone methyltransferase.

[0725] 131. The epigenetic modifying DNA-targeting system of any of embodiments 1-130, wherein the at least one effector domain comprises a DNA methyltransferase and a histone methyltransferase.

[0726] 132. The epigenetic-modifying DNA-targeting system of any of embodiments 1-131, wherein at least one effector domain is selected from a KRAB repressor domain, ERF repressor domain, Mxi1 repressor domain, SID4X repressor domain, Mad-SID repressor domain. LSD1 repressor domain, or DNMT3A, DNMT3A-3L, DNMT3A/L-KRAB fusion repressor domain, DNMT3B domain binding protein, EZH2 repressor domain, or LSD1 repressor domain, or variant of any of the foregoing.

[0727] 133. The epigenetic-modifying DNA-targeting system of any of embodiments 1-132, wherein the at least one effector domain comprises a sequence selected from any one of SEQ ID NOS: 590, or 600-608, 651, 661, 664, 665, 666, 668 and 669 or a domain thereof, a portion thereof, or an amino acid sequence that has at least 90%, 91%, 92%, 93%, 94%, 95%, 96%, 97%, 98%, or 99% sequence identity to any of the foregoing.

[0728] 134. The epigenetic-modifying DNA-targeting system of any of embodiments 1-133, wherein the at least one effector domain comprises a KRAB domain or a variant thereof.

[0729] 135. The epigenetic-modifying DNA-targeting system of any of embodiments 1-134 wherein the at least one effector domain comprises the sequence set forth in SEQ ID NO: 590 a portion thereof, or an amino acid sequence that has at least 90%, 91%, 92%, 93%, 94%, 95%, 96%, 97%, 98%, or 99% sequence identity to any of the foregoing.

[0730] 136. The epigenetic-modifying DNA-targeting system of any of embodiments 1-134, wherein the at least one effector domain comprises a DNMT3A/L domain or a variant thereof.

[0731] 137. The epigenetic-modifying DNA-targeting system of any of embodiments 1-136, wherein:
[0732] the at least one effector domain comprises the sequence set forth in SEQ ID NOS: 604 and 607, a portion thereof, or an amino acid sequence that has at least 90%, 91%, 92%, 93%, 94%, 95%, 96%, 97%, 98%, or 99% sequence identity to any of the foregoing; or
[0733] the at least one effector domain comprises the sequence set forth in SEQ ID NO: 651, a portion thereof, or an amino acid sequence that has at least 90%, 91%, 92%, 93%, 94%, 95%, 96%, 97%, 98%, or 99% sequence identity to SEQ ID NO:651.

[0734] 138. The epigenetic-modifying DNA-targeting system of any of embodiments 1-137, wherein the fusion protein comprises a DNMT3A/3L-dCas9-KRAB fusion protein.

[0735] 139. The epigenetic-modifying DNA-targeting system of any of embodiments 1-138, wherein the fusion protein comprises the sequence set forth in SEQ ID NO: 645 a portion thereof, or an amino acid sequence that has at least 90%, 91%, 92%, 93%, 94%, 95%, 96%, 97%, 98%, or 99% sequence identity to any of the foregoing.

[0736] 140. The epigenetic-modifying DNA-targeting system of any of embodiments 1-139, wherein the at least one effector domain is fused to the N-terminus, the C-terminus, or both the N-terminus and the C-terminus, of the DNA-binding domain or a component thereof.

[0737] 141. The epigenetic-modifying DNA-targeting system of any of embodiments 1-101, or 138-140, wherein the fusion protein is encoded by the sequence set forth in SEQ ID NO: 680, a portion thereof, or an amino acid sequence that has at least 90%, 91%, 92%, 93%, 94%, 95%, 96%, 97%, 98%, or 99% sequence identity to any of the foregoing.

[0738] 142. The epigenetic-modifying DNA-targeting system of any of embodiments 1-101, or 138-140, wherein the fusion protein is encoded by the sequence set forth in SEQ ID NO: 680.

[0739] 143. The epigenetic-modifying DNA-targeting system of any of embodiments 1-5, 11-18, 20-33, 34-61, and 102-140, wherein the fusion protein is encoded by the sequence set forth in any one of SEQ ID NOS:916-943, a portion thereof, or a nucleic acid sequence that has at least 90%, 91%, 92%, 93%, 94%, 95%, 96%, 97%, 98%, or 99% sequence identity to any of the foregoing.

[0740] 144. The epigenetic-modifying DNA-targeting system of embodiment 1-5, 11-18, 20-33, 34-61, 102-140, and 143, wherein the fusion protein comprises the sequence set forth in any one of SEQ ID NOS:944-971, a portion thereof, or an amino acid sequence that has at least 90%, 91%, 92%, 93%, 94%, 95%, 96%, 97%, 98%, or 99% sequence identity to any of the foregoing.

[0741] 145. The epigenetic-modifying DNA-targeting system of any of embodiments 1-5, 11-18, 20-33, 34-61, 102-140, and 143-144, wherein the fusion protein comprises the sequence set forth in any one of SEQ ID NOS: 961, 962, or 968.

[0742] 146. The epigenetic-modifying DNA-targeting system of any of embodiments 1-5, 11-18, 20-33, 34-61, 102-140, and 143-145, wherein the fusion protein comprises a DNMT3A/3L-eZFP-KRAB fusion protein.

[0743] 147. The epigenetic-modifying DNA-targeting system of any of embodiments 1-4, 11-18, 20-33, 34-61, 102-140, and 143-146, wherein the fusion protein is encoded by the sequence set forth in any one of SEQ ID NOS:972-999, a portion thereof, or a nucleic acid sequence that has at least 90%, 91%, 92%, 93%, 94%, 95%, 96%, 97%, 98%, or 99% sequence identity to any of the foregoing.

[0744] 148. The epigenetic-modifying DNA-targeting system of any of embodiments 1-5, 11-18, 20-33, 34-61, 102-140, and 143-147, wherein the fusion protein is encoded by the sequence set forth in any one of SEQ ID NOS:933, 934, or 940, a portion thereof, or a nucleic acid sequence that has at least 90%, 91%, 92%, 93%, 94%, 95%, 96%, 97%, 98%, or 99% sequence identity to any of the foregoing.

[0745] 149. The epigenetic-modifying DNA-targeting system of any of embodiments 1-5, 11-18, 20-33, 34-61, 102-140, and 143-148, wherein the fusion protein comprises the sequence set forth in any one of SEQ ID NOS:1000-1027, a portion thereof, or an amino acid sequence that has at least 90%, 91%, 92%, 93%, 94%, 95%, 96%, 97%, 98%, or 99% sequence identity to any of the foregoing.

[0746] 150. The epigenetic-modifying DNA-targeting system of any of embodiments 1-4, 11-18, 20-33, 34-61, 102-140, and 143-149, wherein the fusion protein comprises the sequence set forth in any one of SEQ ID NOS:1017, 1018, or 1024, a portion thereof, or an amino acid sequence that has at least 90%, 91%, 92%, 93%, 94%, 95%, 96%, 97%, 98%, or 99% sequence identity to any of the foregoing.

[0747] 151. The epigenetic-modifying DNA-targeting system of any of embodiments 1-150, wherein the fusion protein further comprises one or more nuclear localization signals (NLS).

[0748] 152. The epigenetic-modifying DNA-targeting system of any of embodiments 1-151, wherein the fusion protein further comprises one or more linkers connecting two or more of: the DNA-binding domain, the at least one effector domain, and the one or more nuclear localization signals.

[0749] 153. The epigenetic-modifying DNA-targeting system of any of embodiments 1-152, wherein the DNA-targeting system targets all Hepatitis B viral genomes.

[0750] 154. The epigenetic-modifying DNA-targeting system of any of embodiments 1-153, wherein the DNA-targeting system targets at least 70% of all Hepatitis B viral genomes.

[0751] 155. The epigenetic-modifying DNA-targeting system of any of embodiments 1-154, wherein the DNA-targeting system targets at least 60% of all Hepatitis B viral genomes.

[0752] 156. The epigenetic-modifying DNA-targeting system of any of embodiments 1-155, wherein the DNA-targeting system targets at least 50% of all Hepatitis B viral genomes.

[0753] 157. The epigenetic-modifying DNA-targeting system of any one of embodiments 1-156, wherein the DNA-targeting system is not able to introduce a genetic disruption or a DNA break at or near the target site

[0754] 158. The epigenetic-modifying DNA-targeting system of any of embodiments 1-157, wherein repressing transcription of one or more HBV genes results in a reduction in RNA levels and/or protein levels from the HBV DNA sequence.

[0755] 159. The epigenetic-modifying DNA-targeting system of any of embodiments 1-158, wherein repressing transcription comprises a reduction in total Hepatitis B viral RNA transcript levels.

[0756] 160. The epigenetic-modifying DNA-targeting system of any of embodiments 1-159, wherein repressing transcription comprises a reduction in Hepatitis B pre-core (“preC”), pre-genomic (“pgRNA”), preS1, preS2/S, and HBx levels.

[0757] 161. The epigenetic-modifying DNA-targeting system of any of embodiments 1-160, wherein repressing transcription comprises a reduction in HBx levels.

[0758] 162. The epigenetic-modifying DNA-targeting system of any of embodiments 1-161, wherein repressing transcription comprises a reduction in Hepatitis B surface antigen (HBsAg) and/or Hepatitis B viral core-related-antigen (HbcrAg) protein levels.

[0759] 163. The epigenetic-modifying DNA-targeting system of any of embodiments 1-162, wherein repressing transcription comprises a reduction in HbsAg transcript and/or protein levels by at least 90%.

[0760] 164. The epigenetic-modifying DNA-targeting system of any of embodiments 1-163, wherein repressing transcription comprises a reduction in HbcrAg transcript and/or protein levels by at least 50% from the cccDNA.

[0761] 165. A guide RNA (gRNA) that binds a target site in a Hepatitis B viral DNA sequence.

[0762] 166. The gRNA of embodiment 165, wherein the Hepatitis B viral DNA sequence is Hepatitis B (HBV) gene or regulatory element thereof.

[0763] 167. The gRNA of embodiment 165 or embodiment 166, wherein the target site is present in a covalently closed circular DNA (cccDNA) form, relaxed circular DNA (rcDNA) form and/or is integrated in the human genomic DNA.

[0764] 168. The gRNA of any of embodiments 165-167, wherein the target site is at or near a gene or a regulatory element thereof involved in controlling HBV replication and/or HBV transcription.

[0765] 169. The gRNA of embodiment 168, wherein the gene involved in controlling HBV replication and/or HBV transcription encodes a polymerase, an envelope protein, capsid protein, transcription factor, or transcriptional transactivator.

[0766] 170. The gRNA of embodiment 168 or embodiment 169, wherein the gene involved in controlling HBV replication and/or HBV transcription is a polymerase gene, S-family gene, X-gene, or core-family gene.

[0767] 171. The gRNA of any of embodiments 165-170, wherein the target site is in a gene or regulatory element thereof of the X-gene encoding Hepatitis B Virus Protein X (HBx).

[0768] 172. The gRNA of any of embodiments 165-171, wherein the target site is at or near a regulatory element involved in controlling HBV replication and/or HBV transcription.

[0769] 173. The gRNA of embodiment 166-172, wherein the regulatory element is a promoter region.

[0770] 174. The gRNA of embodiment 173, wherein the promoter region is a pre-S1 promoter, a pre-S2 promoter, X promoter, or basal core promoter.

[0771] 175. The gRNA of any of embodiments 166-172, wherein the regulatory element is an enhancer region.

[0772] 176 The gRNA of embodiment 175, wherein the enhancer region is an Enh1 or an Enh2 enhancer region.

[0773] 177. The gRNA of any of embodiments 166-172, wherein the regulatory element is a transcript processing control region.

[0774] 178. The gRNA of any of embodiments 165-171, wherein the target site is a coding region.

[0775] 179. The gRNA of any of embodiments 165-178, wherein the target site is located within 500 bp, within 1000 bp, within 1500 bp of a transcription start site.

[0776] 180. The gRNA of any of embodiments 165-179, wherein the target site is positioned within a target region that has a sequence corresponding to the sequence located at base pairs between 0-3300 base pairs (bp) of the HBV genome, optionally between 0-3189 bp of the HBV genome, with reference to the HBV genome set forth in SEQ ID NO: 650.

[0777] 181. The gRNA of any of embodiments 165-180, wherein the target site is positioned within a target region that has a sequence corresponding to the sequence located at base pairs between 43 bp-490 bp, 1033 bp-1749 bp, 1800 bp-1950 bp, or 2953 bp-3182 bp of the HBV genome with reference to the HBV genome set forth in SEQ ID NO: 650.

[0778] 182. The gRNA of any of embodiments 165-181, wherein the target site is positioned within a target region that has a sequence corresponding to the sequence located at base pairs between 1 bp-42 bp, 491 bp-1032 bp, 1750 bp-1799 bp, or 1951 bp-2952 bp of the HBV genome with reference to the HBV genome set forth in SEQ ID NO: 650.

[0779] 183. The gRNA of any of embodiments 165-182, wherein the target site is in a CpG island of the HBV genome.

[0780] 184. The gRNA of any of embodiments 165-183, wherein the target site is positioned within a target region that has a sequence corresponding to the sequence located at base pairs between 67 bp-392 bp, 1033 bp-1749 bp, or 2215 bp-2490 bp of the HBV genome with reference to the HBV genome set forth in SEQ ID NO: 650.

[0781] 185. The gRNA of any of embodiments 165-184, wherein the target site is positioned within a target region that has a sequence corresponding to the sequence located at base pairs between 1033 bp-1749 bp of the HBV genome with reference to the HBV genome set forth in SEQ ID NO: 650.

[0782] 186. The gRNA of any of embodiments 165-185, wherein the target site is within a target region spanning within 300 base pairs upstream of the hepatitis B X protein (HBx) start codon.

[0783] 187. A gRNA (gRNA) that binds a target site within a target region spanning within 300 base pairs upstream of the hepatitis B X protein (HBx) start codon.

[0784] 188. The gRNA of any of embodiments 165-187, wherein the target site is positioned in the HBx basal core promoter region.

[0785] 189. The gRNA of any of embodiments 165-187, wherein the target site is positioned within the HBx promoter/Enhancer region.

[0786] 190. The gRNA of any of embodiments 165-189, wherein the target site is within a target region spanning within 250 base pairs upstream of the hepatitis B X protein (HBx) start codon.

[0787] 191. The gRNA of any of embodiments 165-190, wherein the target site is within a target region that has a sequence corresponding to the sequence located at base pairs between 1060-1480 bp of the HBV genome with reference to the HBV genome set forth in SEQ ID NO: 650.

[0788] 192. The gRNA of any of embodiments 165-191, wherein the target site is within a target region spanning within 150 base pairs upstream of the hepatitis B X protein (HBx) start codon.

[0789] 193. The gRNA of any of embodiments 165-192, wherein the target site is within a target region spanning within 120 base pairs upstream of the hepatitis B X protein (HBx) start codon.

[0790] 194. The gRNA of any of embodiments 165-193, wherein the target site is within a target region that has a sequence corresponding to the sequence located at base pairs between 1250-1374 bp of the HBV genome with reference to the HBV genome set forth in SEQ ID NO: 650.

[0791] 195. The gRNA of any of embodiments 165-194, wherein the target site is within a target region that has a sequence corresponding to the sequence located at base pairs between 1255-1302 bp of the HBV genome with reference to the HBV genome set forth in SEQ ID NO: 650.

[0792] 196. The gRNA of any of embodiments 165-195, wherein the target site is within a target region that has a sequence corresponding to the sequence located at base pairs between 1260-1300 bp of the HBV genome with reference to the HBV genome set forth in SEQ ID NO: 650.

[0793] 197. The gRNA of any of embodiments 165-196, wherein the gRNA comprises the sequence set forth in any one of SEQ ID NOS: 200, 201, 207, 217, 221, 224, 233, 237, 238, 246, 251, 256, 258, 263, 267, 274, 270, 277, 279, 283, 284, 293, 294, 308, 311, 313, 316, 319, 320, 325, 328, 330, 333, 338, 345, 347, 350, 353, 359, 360, 369, 370, 371, 377, 380, 384, 385, or 387, a contiguous portion thereof of at least 14 nucleotides, or a complementary sequence of any of the foregoing, optionally wherein the gRNA, or each of the gRNA, is set forth in any one of SEQ ID NOS: 395, 402, 408, 412, 416, 419, 428, 432, 433, 441, 446, 451, 453, 458, 462, 465, 469, 472, 474, 478, 479, 488, 489, 503, 506, 508, 511, 514, 515, 520, 523, 525, 575, 528, 533, 540, 542, 545, 548, 554, 555, 565, 566, 572, 579, 580, or 582.

[0794] 198. The gRNA of any of any of embodiments 165-196, wherein the gRNA is set forth in any one of SEQ ID NOS: 395, 402, 408, 412, 416, 419, 428, 432, 433, 441, 446, 451, 453, 458, 462, 465, 469, 472, 474, 478, 479, 488, 489, 503, 506, 508, 511, 514, 515, 520, 523, 525, 575, 528, 533, 540, 542, 545, 548, 554, 555, 565, 566, 572, 579, 580, or 582.

[0795] 199. The gRNA of any of embodiments 165-198, wherein the gRNA comprises the sequence set forth in any one of SEQ ID NOS: 207, 213, 215, 217, 221, 222, 241, 245, 258, 261, 268, 274, 380, 387, a contiguous portion thereof of at least 14 nucleotides, or a complementary sequence of any of the foregoing, optionally wherein the gRNA, or each of the gRNA, is set forth in any one of SEQ ID NOS: 402, 408, 410, 412, 416, 417, 436, 440, 453, 456, 463, 469, 575, or 582.

[0796] 200. The gRNA of any of embodiments 165-199, wherein the gRNA comprises the sequence set forth in any one of SEQ ID NOS: 402, 408, 410, 412, 416, 417, 436, 440, 453, 456, 463, 469, 575, or 582.

[0797] 201. The gRNA of any of embodiments 165-200, wherein the gRNA comprises the sequence set forth in SEQ ID NO: 217, a contiguous portion thereof of at least 14 nucleotides, or a complementary sequence of any of the foregoing, optionally wherein the gRNA, or each of the gRNA, is set forth in any one of SEQ ID NO: 412.

[0798] 202. The gRNA of any of embodiments 165-201, wherein the gRNA comprises the sequence set forth in SEQ ID NO: 412.

[0799] 203. A CRISPR Cas-guide RNA (gRNA) combination comprising:
[0800] (a) a Clustered Regularly Interspaced Short Palindromic Repeats associated (Cas) protein or variant thereof; and
[0801] (b) at least one gRNA of any of embodiments 165-202 that targets the Cas protein or variant thereof to a target site in target site in a Hepatitis B viral DNA sequence.

[0802] 204. The CRISPR Cas-gRNA combination of embodiment 203, wherein the Cas protein or a variant thereof is a Cas9 protein or a variant thereof.

[0803] 205. The CRISPR Cas-gRNA combination of embodiment 203 or embodiment 204, wherein the Cas protein or a variant thereof is a variant Cas protein, wherein the variant Cas protein lacks nuclease activity or is a deactivated Cas (dCas) protein.

[0804] 206. The CRISPR Cas-gRNA combination of embodiment 203-205, wherein the variant Cas protein is a variant Cas9 protein that lacks nuclease activity or that is a deactivated Cas9 (dCas9) protein.

[0805] 207. The CRISPR Cas-gRNA combination of any of embodiments 203-206, wherein the Cas9 protein or a variant thereof is a Staphylococcus aureus Cas9 (SaCas9) protein or a variant thereof.

[0806] 208. The CRISPR Cas-gRNA combination of embodiment 207, wherein the variant Cas9 is a Staphylococcus aureus dCas9 protein (dSaCas9) that comprises at least one amino acid mutation selected from D10A and N580A, with reference to numbering of positions of SEQ ID NO: 596.

[0807] 209. The CRISPR Cas-gRNA combination of embodiment 207 or embodiment 208, wherein the variant Cas9 protein comprises the sequence set forth in SEQ ID NO: 597, or an amino acid sequence that has at least 90%, 91%, 92%, 93%, 94%, 95%, 96%, 97%, 98%, or 99% sequence identity thereto.

[0808] 210. The CRISPR Cas-gRNA combination of any of embodiments 203-206, wherein the Cas9 protein or variant thereof is a Streptococcus pyogenes Cas9 (SpCas9) protein or a variant thereof.

[0809] 211. The CRISPR Cas-gRNA combination of embodiment 210, wherein the variant Cas9 is a Streptococcus pyogenes dCas9 (dSpCas9) protein that comprises at least one amino acid mutation selected from D10A and H840A, with reference to numbering of positions of SEQ ID NO: 598.

[0810] 212. The CRISPR Cas-gRNA combination of embodiment 210 or embodiment 211, wherein the variant Cas9 protein comprises the sequence set forth in SEQ ID NO: 599, or an amino acid sequence that has at least 90%, 91%, 92%, 93%, 94%, 95%, 96%, 97%, 98%, or 99% sequence identity thereto.

[0811] 213. A polynucleotide encoding the epigenetic-modifying DNA-targeting system of any of embodiments 1-164 or a fusion protein of the DNA-targeting system of any of embodiments 1-164, the gRNA of any of embodiments 165-202, the CRISPR Cas-gRNA combination of any of embodiments 203-212, or a portion or a component of any of the foregoing.

[0812] 214. A plurality of polynucleotides encoding the epigenetic-modifying DNA-targeting system of any of embodiments 1-164 or the fusion protein of the DNA-targeting system of any of embodiments 1-164, the gRNA of any of embodiments 165-202, the CRISPR Cas-gRNA combination of any of embodiments 203-212, or a portion or a component of any of the foregoing.

[0813] 215. A vector comprising the polynucleotide of embodiment 213.

[0814] 216. A vector comprising the plurality of polynucleotides of embodiment 214.

[0815] 217. The vector of any of embodiments 215 or 216, wherein the vector is a viral vector.

[0816] 218. The vector of embodiment 217, wherein the vector is an adeno-associated virus (AAV) vector.

[0817] 219. The vector of embodiment 218, wherein the vector is selected from among AAV1, AAV2, AAV3, AAV4, AAV5, AAV6, AAV7, AAV8, or AAV9.

[0818] 220. The vector of embodiment 219, wherein the vector is a lentiviral vector.

[0819] 221. The vector of embodiment 215 or embodiment 216, wherein the vector is a non-viral vector.

[0820] 222. The vector of embodiment 221, wherein the non-viral vector is selected from: a lipid nanoparticle, a liposome, an exosome, or a cell penetrating peptide.

[0821] 223. The vector of any of embodiments 215-222, wherein the vector exhibits tropism towards a Hepatitis B virus infected cell, optionally wherein the infected cell is a hepatocyte.

[0822] 224. The vector of any of embodiments 215-223, wherein the vector comprises one vector, or two or more vectors.

[0823] 225. A method of promoting epigenetic modification within a target region in a Hepatitis B viral sequence, the method comprising introducing an epigenetic modifying DNA-targeting system that targets a target site within the target region into an HBV infected cell comprising a Hepatitis viral sequence.

[0824] 226. A method of increasing CpG methylation within a target region in a Hepatitis B viral sequence, the method comprising introducing an epigenetic modifying DNA-targeting system that targets a target site within the target region into an HBV infected cell comprising a Hepatitis viral sequence.

[0825] 227. A method of promoting epigenetic modification of a target region in a Hepatitis B viral sequence, the method comprising introducing into an HBV infected cell comprising a Hepatitis B viral sequence an epigenetic modifying DNA-targeting system of any of embodiments 1-164, the gRNA of any of embodiments 165-202, the CRISPR Cas-gRNA combination of any of embodiments 203-212, the polynucleotide of embodiment 213, the plurality of polynucleotides of embodiment 214, the vector of any of embodiments 215-224, or a portion or a component of any of the foregoing.

[0826] 228. A method of increasing CpG methylation of a target region in a Hepatitis B viral sequence, the method comprising introducing into an HBV infected cell comprising a Hepatitis B viral sequence an epigenetic modifying DNA-targeting system of any of embodiments 1-164, the gRNA of any of embodiments 165-202, the CRISPR Cas-gRNA combination of any of embodiments 203-212, the polynucleotide of embodiment 213, the plurality of polynucleotides of embodiment 214, the vector of any of embodiments 215-224, or a portion or a component of any of the foregoing.

[0827] 229. The method of any of embodiments 225-228, wherein the target region comprises a contiguous sequence of nucleotides within the sequence corresponding to the sequence located at base pairs between 1033 bp-1749 bp in a Hepatitis B viral sequence with reference to nucleotide positions of SEQ ID NO: 650.

[0828] 230. A method of reducing transcription of one or more genes in an HBV infected cell comprising a Hepatitis B viral sequence, the method comprising introducing into the cell an epigenetic-modifying DNA-targeting system that induces targeted CpG methylation within a Hepatitis B viral sequence with reference to nucleotide positions of SEQ ID NO: 650.

[0829] 231. A method of reducing Hepatitis B virus infection in an HBV infected cell comprising introducing into a cell comprising a Hepatitis B viral sequence an epigenetic-modifying DNA-targeting system that induces targeted CpG methylation within a target region in a Hepatitis B viral sequence with reference to nucleotide positions of SEQ ID NO: 650.

[0830] 232. The method of any of embodiments 225-231, wherein the epigenetic modifying DNA-targeting system comprises at least one DNA-targeting module that comprises a fusion protein comprising (a) a DNA-binding domain for targeting a target site in a Hepatitis B viral DNA sequence; and (b) at least one effector domain comprising a DNA methyltransferase effector domain.

[0831] 233. The method of any of embodiments 226 and 228-232, wherein the region of CpG methylation is within 500 base pairs of the target region.

[0832] 234. The method of embodiments 225-233, wherein the introducing occurs in vivo in a subject or ex vivo.

[0833] 235. The method of any of embodiments 225-234, wherein the cell is a mammalian cell.

[0834] 236. The method of any of embodiments 225-235, wherein the cell is a human cell.

[0835] 237. The method of any of embodiments 225-236, wherein the cell comprises integrated HBV DNA.

[0836] 238. The method of any of embodiments 225-237, wherein the cell is a hepatocyte comprising a pool of episomal HBV cccDNA.

[0837] 239. The method of any of embodiments 238, wherein the hepatocyte expresses HBV proteins, wherein the HBV proteins are HBsAg, HBeAg, or HBcrAg, or combinations of the foregoing.

[0838] 240. A method of reducing Hepatitis virus infection in a subject comprising administering to a subject infected with Hepatitis B an epigenetic modifying DNA-targeting system that increases CpG methylation within a target region in a Hepatitis B viral sequence, wherein the epigenetic modifying DNA-targeting system comprises (a) a DNA-binding domain for targeting to the target site in a Hepatitis B viral DNA sequence; and (b) at least one effector domain comprising a DNA methyltransferase effector domain.

[0839] 241. The method of any of embodiments 225-240, wherein the target region is a region that comprises CpGs in the HBV genome.

[0840] 242. The method of any of embodiments 225-241, wherein the target region comprises a contiguous sequence of nucleotides corresponding to the sequence located at base pairs between 67 bp-392 bp, 1033 bp-1749 bp, or 2215 bp-2490 bp in a Hepatitis B viral sequence with reference to nucleotide positions of SEQ ID NO: 650.

[0841] 243. The method of any of embodiments 225-242, wherein the target region comprises a contiguous sequence of nucleotides corresponding to the sequence located at base pairs between 1033 bp-1749 bp in a Hepatitis B viral sequence with reference to nucleotide positions of SEQ ID NO: 650.

[0842] 244. The method of any of embodiments 225-244, wherein the target region is located within 300 base pairs upstream of the hepatitis B X protein (HBx) start codon.

[0843] 245. The method of any of embodiments 225-244, wherein the target region is within the HBx basal core promoter region.

[0844] 246. The method of any of embodiments 225-245, wherein the target region is within the HBx promoter/Enhancer region.

[0845] 247. The method of any of embodiments 225-246, wherein the target region is within 250 base pairs upstream of the hepatitis B X protein (HBx) start codon.

[0846] 248. The method of any of embodiments 225-247, wherein the target region comprises a contiguous sequence of nucleotides corresponding to the sequence located between base pairs 1060 bp-1480 bp in a Hepatitis B viral sequence with reference to nucleotide positions of SEQ ID NO: 650.

[0847] 249. The method of any of embodiments 225-248, wherein the target region is within 150 base pairs upstream of the hepatitis B X protein (HBx) start codon.

[0848] 250. The method of any of embodiments 225-249, wherein the target region is within 120 base pairs upstream of the hepatitis B X protein (HBx) start codon.

[0849] 251. The method of any of embodiments 225-250, wherein the target region comprises a contiguous sequence of nucleotides corresponding to the sequence located between base pairs 1250 bp-1374 bp in a Hepatitis B viral sequence with reference to nucleotide positions of SEQ ID NO: 650

[0850] 252. The method of any of embodiments 225-251, wherein the target region comprises a contiguous sequence of nucleotides corresponding to the sequence located between base pairs 1260 bp-1300 bp in a Hepatitis B viral sequence with reference to nucleotide positions of SEQ ID NO: 650

[0851] 253. The method of embodiments 225-252, wherein the DNA-binding domain comprises a Clustered Regularly Interspaced Short Palindromic Repeats associated (Cas)-guide RNA (gRNA) combination comprising (a) a Cas protein or a variant thereof and (b) at least one gRNA; a zinc finger protein (ZFP); a transcription activator-like effector (TALE); a meganuclease; a homing endonuclease; or an I-SceI enzyme or a variant thereof, optionally wherein the DNA-binding domain comprises a catalytically inactive variant of any of the foregoing.

[0852] 254. The method of any one of embodiments 225-254, comprising a CRISPR Cas-guide RNA (gRNA) combination comprising:
[0853] (a) a Clustered Regularly Interspaced Short Palindromic Repeats associated (Cas) protein or variant thereof; and
[0854] (b) at least one gRNA of any of embodiments 165-202 that targets the Cas protein or variant thereof to a target site in target site in a Hepatitis B viral DNA sequence.

[0855] 255. The method of any of embodiments 225-254, wherein the target site, or each of the target sites, comprises the sequence set forth in any one of SEQ ID NOs: 5, 6, 12, 18, 22, 26, 29, 38, 42, 43, 51, 56, 61, 63, 68, 72, 75, 79, 82, 84, 88, 89, 98, 99, 113, 116, 121, 124, 125, 118, 130, 133, 135, 138, 143, 150, 152, 155, 158, 164, 165, 175, 176, 182, 185, 189, 190, 192, a contiguous portion thereof of at least 14 nucleotides (nt), or a complementary sequence of any of the foregoing.

[0856] 256. The method of any of embodiments 225-255, wherein the target site, or each of the target sites, comprises the sequence set forth in any one of SEQ ID NOs: 12, 18, 20, 22, 26, 27, 46, 50, 63, 66, 73, 79, 185, 192, a contiguous portion thereof of at least 14 nucleotides (nt), or a complementary sequence of any of the foregoing.

[0857] 257. The method of any of embodiments 225-256, wherein the target site, or each of the target sites, comprises the sequence set forth in SEQ ID NO:22, a contiguous portion thereof of at least 14 nucleotides (nt), or a complementary sequence of any of the foregoing.

[0858] 258. The method of any of embodiments 225-257, wherein the gRNA, or each of the gRNA, comprises the sequence set forth in any one of SEQ ID NOS: 200, 201, 207, 217, 221, 224, 233, 237, 238, 246, 251, 256, 258, 263, 267, 274, 270, 277, 279, 283, 284, 293, 294, 308, 311, 313, 316, 319, 320, 325, 328, 330, 333, 338, 345, 347, 350, 353, 359, 360, 370, 371, 377, 380, 384, 385, 387, a contiguous portion thereof of at least 14 nucleotides, or a complementary sequence of any of the foregoing, optionally wherein the gRNA, or each of the gRNA, is set forth in any one of SEQ ID NOS: 395, 402, 408, 412, 416, 419, 428, 432, 433, 441, 446, 451, 453, 458, 462, 465, 469, 472, 474, 478, 479, 488, 489, 503, 506, 508, 511, 514, 515, 520, 523, 525, 575, 528, 533, 540, 542, 545, 548, 554, 555, 565, 566, 572, 579, 580, or 582.

[0859] 259. The method of any of embodiments 225-258, wherein the gRNA, or each of the gRNA, comprises the sequence set forth in any one of SEQ ID NOS: 207, 213, 215, 217, 221, 222, 241, 245, 258, 261, 268, 274, 380, 387, a contiguous portion thereof of at least 14 nucleotides, or a complementary sequence of any of the foregoing, optionally wherein the gRNA, or each of the gRNA, is set forth in any one of SEQ ID NOS: 402, 408, 410, 412, 416, 417, 436, 440, 453, 456, 463, 469, 575, 582.

[0860] 260. The method of any of embodiments 225-259, wherein the gRNA, or each of the gRNA, comprises the sequence set forth in any one of SEQ ID NO: 217, a contiguous portion thereof of at least 14 nucleotides, or a complementary sequence of any of the foregoing, optionally wherein the gRNA, or each of the gRNA, is set forth in any one of SEQ ID NO: 412.

[0861] 261. The method of any of embodiments 225-253, wherein the at least one DNA-binding domain comprises an engineered zinc finger protein (eZFP).

[0862] 262. The method of any of embodiments 225-253 or 261, wherein the target site comprises the nucleotide sequence set forth in any one of SEQ ID NOS: 1045, 1046, 1052, a contiguous portion thereof of at least 12 nt, or a complementary sequence of any of the foregoing.

[0863] 263. The method of any of embodiments 225-253, or 261-262, wherein the target site comprises the nucleotide sequence set forth in any one of SEQ ID NOS: 1045, 1046, 1052.

[0864] 264. The method of any of embodiments 225-263, wherein at least one effector domain is a DNA methyltransferase.

[0865] 265. The method of any of embodiments 225-264, wherein at least one effector domain comprises a DNA methyltransferase and a repressor domain capable of recruiting heterochromatin inducing factors or optionally wherein the heterochromatin inducing factors include a histone methyltransferase.

[0866] 266. The method of any of embodiments 225-265, wherein the at least one effector domain comprises a DNA methyltransferase and a histone methyltransferase.

[0867] 267. The method of any of embodiments 225-266, wherein the at least one effector domain comprises a DNMT3A/L domain or a variant thereof.

[0868] 268. The method of any of embodiments 225-267, wherein the at least one effector domain comprises the sequence set forth in SEQ ID NO: 651 a portion thereof, or an amino acid sequence that has at least 90%, 91%, 92%, 93%, 94%, 95%, 96%, 97%, 98%, or 99% sequence identity to any of the foregoing.

[0869] 269. The method of any of embodiments 225-268, wherein the at least one effector domain further comprises a KRAB domain or a variant thereof.

[0870] 270. The method of any of embodiments 225-269, wherein the at least one effector domain further comprises the sequence set forth in SEQ ID NO: 590 a portion thereof, or an amino acid sequence that has at least 90%, 91%, 92%, 93%, 94%, 95%, 96%, 97%, 98%, or 99% sequence identity to any of the foregoing.

[0871] 271. The method of any of embodiments 225-270, wherein the DNA-targeting system comprises a DNMT3A/3L-dCas9-KRAB domain or a variant thereof.

[0872] 272. The method of any of embodiments 225-271, wherein the DNA-targeting system comprises the sequence set forth in SEQ ID NO: 645 a portion thereof, or an amino acid sequence that has at least 90%, 91%, 92%, 93%, 94%, 95%, 96%, 97%, 98%, or 99% sequence identity to any of the foregoing.

[0873] 273. The method of any of embodiments 225-260 or 264-272, wherein the DNA-targeting system comprises the sequence set forth in SEQ ID NO: 680 a portion thereof, or a nucleic acid sequence that has at least 90%, 91%, 92%, 93%, 94%, 95%, 96%, 97%, 98%, or 99% sequence identity to any of the foregoing.

[0874] 274. The method of any of embodiments 225-260 or 264-273, wherein the DNA-targeting system comprises the sequence set forth in SEQ ID NO: 680.

[0875] 275. A method of repressing the transcription of one or more genes in Hepatitis B virus infected cell, the method comprising introducing into a Hepatitis B virus infected cell an epigenetic-modifying DNA-targeting system of any of embodiments 1-164, the gRNA of any of embodiments 165-202, the CRISPR Cas-gRNA combination of any of embodiments 203-212, the polynucleotide of embodiment 213, the plurality of polynucleotides of embodiment 214, the vector of any of embodiments 215-224, or a portion or a component of any of the foregoing.

[0876] 276. The method of embodiment 225-275, wherein the one or more genes are epigenetically modified by the DNA-targeting system.

[0877] 277. The method of embodiment 225-275, wherein the transcription of the one or more genes is reduced in comparison to a comparable cell not subjected to the method.

[0878] 278. The method of embodiment 277, wherein the transcription of the one or more genes is reduced by at least about 1.25-fold, 1.5-fold, 1.75-fold, 2.0-fold, 2.5-fold, 2.75-fold, 3.0-fold, 3.5-fold, 3.75-fold, 4.0 fold, 4.5-fold, 4.75-fold, 5.0-fold, 5.25-fold, 5.5-fold, 5.75-fold, 6-fold.

[0879] 279. The method of any of embodiments 225-278, wherein repressing transcription of the one or more genes results in reduced HBV replication and/or HBV transcription.

[0880] 280. The method of any of embodiments 225-279, wherein the HBV infected cell is a mammalian cell.

[0881] 281. The method of any of embodiments 225-280, wherein the HBV infected cell is a human cell.

[0882] 282. The method of any of embodiments 225-281, wherein the cell comprises integrated HBV DNA.

[0883] 283. The method of any of embodiments 225-282, wherein the cell is a hepatocyte comprising a pool of episomal HBV cccDNA.

[0884] 284. The method of any of embodiments 225-283, wherein the hepatocyte expresses HBV proteins, wherein the HBV proteins are HBsAg, and/or HBeAg.

[0885] 285. The method of any of embodiments 225-284, wherein the HBV infected cells in present in a subject.

[0886] 286. The method of any of embodiments 225-285, wherein the subject is a human.

[0887] 287. The method of any of embodiments 225-286, wherein the subject has an HBV viral infection.

[0888] 288. The method of any of embodiments 225-288, wherein the subject has hepatocytes comprising integrated HBV DNA.

[0889] 289. The method of any of embodiments 225-288, wherein the subject has hepatocytes comprising a pool of episomal HBV cccDNA.

[0890] 290. The method of any of embodiments 225-289, wherein the subject has hepatocytes expressing HBV proteins, wherein the HBV proteins are HBsAg, HBeAg, or HBcrAg and combinations thereof.

[0891] 291. The method of any of embodiments 225-290, wherein the subject has a disease, condition or disorder associated with the HBV viral infection.

[0892] 292. The method of any of embodiments 291, wherein the disease, condition, or disorder is a liver disease or a cancer.

[0893] 293. The method of any of embodiments 291 or embodiment 292, wherein the disease, condition, or disorder is acute hepatitis, chronic hepatitis, liver failure, or liver cirrhosis.

[0894] 294. The method of any of embodiments 291-293, wherein the disease, condition, or disorder is cancer, optionally wherein the cancer is hepatocellular cancer.

[0895] 295. A pharmaceutical composition comprising the vector of any of embodiments 215-224.

[0896] 296. The pharmaceutical composition of embodiment 295, wherein the vector is conjugated to an amino sugar derivative of galactose, optionally wherein the vector is conjugated to an N-Acetylegalactosamine (GalNAc) moiety.

[0897] 297. A pharmaceutical composition comprising the epigenetic-modifying DNA-targeting system of any of embodiments 1-164 or the fusion protein of any of embodiments 1-164, the gRNA of any of embodiments 165-202, the CRISPR Cas-gRNA combination of any of embodiments 203-212, the polynucleotide of embodiment 213, the plurality of polynucleotides of embodiment 214, the vector of any of embodiments 215-224, or a portion or a component of any of the foregoing.

[0898] 298. The pharmaceutical composition of embodiment 295-297, for use in treating an HBV viral infection in a subject.

[0899] 299. The pharmaceutical composition of any of embodiments 295-298, wherein the subject has a disease, condition or disorder associated with the HBV viral infection.

[0900] 300. The pharmaceutical composition of embodiment 295-299, for use in treating a disease, disorder or condition in a subject associated with an HBV viral infection.

[0901] 301. The pharmaceutical composition of any of embodiments 295-300, for use in the manufacture of a medicament for treating an HBV viral infection in a subject.

[0902] 302. The pharmaceutical composition for use of any of embodiments 298-301, wherein the HBV viral infection is associated with a disease, disorder or condition.

[0903] 303. The pharmaceutical composition of any of embodiments 295-300, for use in the manufacture of a medicament for treating a disease, condition, or disorder in a subject associated with an HBV viral infection.

[0904] 304. The pharmaceutical composition of embodiments 299, 300, 302 or 303, wherein the disease, condition, or disorder is liver disease or a cancer.

[0905] 305. The pharmaceutical composition of embodiments 299, 300, 302 or 303, wherein the disease, condition, or disorder is acute hepatitis, chronic hepatitis, liver failure, or liver cirrhosis.

[0906] 306. The pharmaceutical composition of embodiments 299, 300, 302 303 or 304, wherein the disease, condition, or disorder is cancer, optionally hepatocellular cancer.

[0907] 307. The pharmaceutical composition of any of embodiments 295-306, wherein the pharmaceutical composition is to be administered to the subject in vivo.

[0908] 308. The pharmaceutical composition of any of embodiments 295-307, wherein following administration of the pharmaceutical composition, transcription of one or more HBV genes is repressed in cells of the subject.

[0909] 309. The pharmaceutical composition of embodiment 308, wherein the one or more HBV genes are involved in controlling HBV replication and/or HBV transcription.

[0910] 310. The pharmaceutical composition of embodiment 308 or 309, wherein the one or more genes is a polymerase gene, S-family gene, X-gene, or core family gene.

[0911] 311. A method for treating a disease, condition, or disorder in a subject in need thereof, comprising administering to the subject the epigenetic-modifying DNA-targeting system of any of embodiments 1-164, the gRNA of any of embodiments 165-202, the CRISPR Cas-gRNA combination of any of embodiments 203-212, the polynucleotide of embodiment 213, the plurality of polynucleotides of embodiment 214, the vector of any of embodiments 215-224, the pharmaceutical composition of any of embodiments 297-310, or a portion or a component of any of the foregoing.

[0912] 312. A method of reducing Hepatitis B virus infection in a subject comprising administering to a subject that has a Hepatitis B virus infection, the epigenetic-modifying DNA-targeting system of any of embodiments 1-164, the gRNA of any of embodiments 165-202, the CRISPR Cas-gRNA combination of any of embodiments 203-212, the polynucleotide of embodiment 213, the plurality of polynucleotides of embodiment 214, the vector of any of embodiments 215-224, the pharmaceutical composition of any of embodiments 297-310, or a portion or a component of any of the foregoing.

[0913] 313. An engineered zinc finger protein (eZFP) that binds to a target site in one or more HBV genes or regulatory elements thereof, wherein the target site is within a target region that has a sequence corresponding to the sequence located at base pairs between 1033 bp-1749 bp of the HBV genome with reference to the HBV genome set forth in SEQ ID NO: 650.

[0914] 314. The eZFP of embodiment 313, wherein the target site is within a target region spanning within 300 base pairs upstream of the hepatitis B X protein (HBx) start codon.

[0915] 315. The eZFP of embodiment 313 or embodiment 314, wherein the target site is positioned in the HBx basal core promoter region.

[0916] 316. The eZFP of embodiment 313 or embodiment 314, wherein the target site is positioned within the HBx promoter/Enhancer region.

[0917] 317. The eZFP of any of embodiments 313-316, wherein the target site is within a target region spanning within 250 base pairs upstream of the hepatitis B X protein (HBx) start codon.

[0918] 318. The eZFP of any of embodiments 313-317, wherein the target site is within a target region that has a sequence corresponding to the sequence located at base pairs between 1060-1480 bp of the HBV genome with reference to the HBV genome set forth in SEQ ID NO: 650.

[0919] 319. The eZFP of any of embodiments 313-318, wherein the target site is within a target region spanning within 150 base pairs upstream of the hepatitis B X protein (HBx) start codon.

[0920] 320. The eZFP of any of embodiments 313-319, wherein the target site is within a target region spanning within 120 base pairs upstream of the hepatitis B X protein (HBx) start codon.

[0921] 321. The eZFP of any of embodiments 313-320, wherein the target site is within a target region has a sequence corresponding to the sequence located at base pairs between 1250-1374 bp of the HBV genome with reference to the HBV genome set forth in SEQ ID NO: 650.

[0922] 322. The eZFP of any of embodiments 313-321, wherein the target site is within a target region that has a sequence corresponding to the sequence located at base pairs between 1255-1302 bp of the HBV genome with reference to the HBV genome set forth in SEQ ID NO: 650.

[0923] 323. The eZFP of any of embodiments 313-322, wherein the target site is within a target region that has a sequence corresponding to the sequence located at base pairs between 1260-1300 bp of the HBV genome with reference to the HBV genome set forth in SEQ ID NO: 650.

[0924] 324. The eZFP of embodiment 323, wherein the target site is within a target region that has a sequence corresponding to the sequence located at base pairs between 1255 bp-1290 bp of the HBV genome with reference to the HBV genome set forth in SEQ ID NO: 650.

[0925] 325. The eZFP of any of embodiments 313-324, wherein the target site comprises the nucleotide sequence set forth in any one of SEQ ID NOS: 1028-1055, a contiguous portion thereof of at least 12 nt, or a complementary sequence of any of the foregoing.

[0926] 326. The eZFP of any of embodiments 313-325, wherein the target site comprises the nucleotide sequence set forth in any one of SEQ ID NOS: 1028-1055.

[0927] 327. The eZFP of any of embodiments 313-326, wherein the target site comprises the nucleotide sequence set forth in any one of SEQ ID NOS: 1045, 1046, or 1052, a contiguous portion thereof of at least 12 nt, or a complementary sequence of any of the foregoing.

[0928] 328. The eZFP of any of embodiments 313-326, wherein the target site comprises the nucleotide sequence set forth in any one of SEQ ID NOS: 1045, 1046, or 1052.

[0929] 329. The eZFP of any of embodiments 313-328, wherein the zinc finger protein comprises six zinc fingers denoted F1 through F6 in order from N-terminus to C-terminus,

and wherein the amino acid sequence of each zinc finger recognition region is as follows:

1)
F1:
(SEQ ID NO: 720)
SEADRSR
F2:
(SEQ ID NO: 721)
DRSNLTR
F3:
(SEQ ID NO: 722)
QSSDLSR
F4:
(SEQ ID NO: 723)
YHWYLKK
F5:
(SEQ ID NO: 724)
RSDSLSV
F6:
(SEQ ID NO: 725)
QNANRKT;
2)
F1:
(SEQ ID NO: 726)
RSDVLST
F2:
(SEQ ID NO: 727)
DNSSRTR
F3:
(SEQ ID NO: 728)
RPYTLRL
F4:
(SEQ ID NO: 729)
DSSHRTR
F5:
(SEQ ID NO: 730)
RSDHLSQ
F6:
(SEQ ID NO: 731)
DSSHRTR;
3)
F1:
(SEQ ID NO: 732)
RSDHLSQ
F2:
(SEQ ID NO: 733)
QSADRTK
F3:
(SEQ ID NO: 734)
RSDHLSQ
F4:
(SEQ ID NO: 735)
RRSDLKR
F5:
(SEQ ID NO: 736)
RSDHLSR
F6:
(SEQ ID NO: 737)
QSSDLRR;
4)
F1:
(SEQ ID NO: 738)
RSDNLSE
F2:
(SEQ ID NO: 739)
TSSNRKT
F3:
(SEQ ID NO: 740)
DRSHLTR
F4:
(SEQ ID NO: 741)
RSDALTQ
F5:
(SEQ ID NO: 742)
DRSALAR
F6:
(SEQ ID NO: 743)
RRFTLSK;
5)
F1:
(SEQ ID NO: 744)
RSDHLSE
F2:
(SEQ ID NO: 745)
QYSGRYY
F3:
(SEQ ID NO: 746)
HGQTLNE
F4:
(SEQ ID NO: 747)
QSGNLAR
F5:
(SEQ ID NO: 748)
RSDSLLR
F6:
(SEQ ID NO: 749)
CREYRGK;
6)
F1:
(SEQ ID NO: 750)
QSANRTT
F2:
(SEQ ID NO: 751)
RSANLTR
F3:
(SEQ ID NO: 752)
RSDVLSE
F4:
(SEQ ID NO: 753)
TSGHLSR
F5:
(SEQ ID NO: 754)
QSSDLSR,
F6:
(SEQ ID NO: 755)
QWSTRKR;
7)
F1:
(SEQ ID NO: 756)
QSGNLAR
F2:
(SEQ ID NO: 757)
ATCCLAH
F3:
(SEQ ID NO: 758)
RWQYLPT
F4:
(SEQ ID NO: 759)
DRSALAR
F5:
(SEQ ID NO: 760)
RSDNLSE
F6:
(SEQ ID NO: 761)
KRCNLRC;
8)
F1:
(SEQ ID NO: 762)
NPANLTR
F2:
(SEQ ID NO: 763)
QNATRTK
F3:
(SEQ ID NO: 764)
QSGHLAR
F4:
(SEQ ID NO: 765)
NRHDRAK
F5:
(SEQ ID NO: 766)
RSDHLSE,
F6:
(SEQ ID NO: 767)
QRRSRYK;
9)
F1:
(SEQ ID NO: 768)
QSSDLSR
F2:
(SEQ ID NO: 769)
HRSTRNR
F3:
(SEQ ID NO: 770)
RSDVLSA
F4:
(SEQ ID NO: 771)
DSRTRKN
F5:
(SEQ ID NO: 772)
QSGSLTR
F6:
(SEQ ID NO: 773)
DQSGLAH;
10)
F1:
(SEQ ID NO: 774)
QNPAQWR
F2:
(SEQ ID NO: 775)
RSADLSR
F3:
(SEQ ID NO: 776)
TSGSLSR
F4:
(SEQ ID NO: 777)
RSDHLSR
F5:
(SEQ ID NO: 778)
RSDSLLR
F6:
(SEQ ID NO: 779)
QSYDRFQ;
11)
F1:
(SEQ ID NO: 780)
TSGSLSR
F2:
(SEQ ID NO: 781)
RSDHLSR
F3:
(SEQ ID NO: 782)
RSDSLLR
F4:
(SEQ ID NO: 783)
QSYDRFQ
F5:
(SEQ ID NO: 784)
RSDNLST
F6:
(SEQ ID NO: 785)
DNRDRIK;
12)
F1:
(SEQ ID NO: 786)
DRSNLSR
F2:
(SEQ ID NO: 787)
LRQNLIM
F3:
(SEQ ID NO: 788)
ERGTLAR
F4:
(SEQ ID NO: 789)
RSDALTQ
F5:
(SEQ ID NO: 790)
RSDSLSQ
F6:
(SEQ ID NO: 791)
RKADRTR;
13)
F1:
(SEQ ID NO: 792)
QYCCLTN
F2:
(SEQ ID NO: 793)
TSGNLTR
F3:
(SEQ ID NO: 794)
QSSDLSR
F4:
(SEQ ID NO: 795)
FRYYLKR
F5:
(SEQ ID NO: 796)
QSGDLTR
F6:
(SEQ ID NO: 797)
DKGNLTK;
14)
F1:
(SEQ ID NO: 798)
TSGSLSR
F2:
(SEQ ID NO: 799)
RSDNLTT
F3:
(SEQ ID NO: 800)
QSGNLAR
F4:
(SEQ ID NO: 801)
DRTTLMR
F5:
(SEQ ID NO: 802)
QSGHLAR
F6:
(SEQ ID NO: 803)
QLTHLNS;
15)
F1:
(SEQ ID NO: 804)
IKHDLHR
F2:
(SEQ ID NO: 805)
RSANLTR
F3:
(SEQ ID NO: 806)
RSDNLAR
F4:
(SEQ ID NO: 807)
QNVSRPR
F5:
(SEQ ID NO: 808)
RSDDLSK
F6:
(SEQ ID NO: 809)
DSSHRTR;
16)
F1:
(SEQ ID NO: 810)
RSDNLAR
F2:
(SEQ ID NO: 811)
QNVSRPR
F3:
(SEQ ID NO: 812)
RSDDLSK
F4:
(SEQ ID NO: 813)
DSSHRTR
F5:
(SEQ ID NO: 814)
TSSNRKT
F6:
(SEQ ID NO: 815)
AQWTRAC;
17)
F1:
(SEQ ID NO: 816)
RSDDLSK
F2:
(SEQ ID NO: 817)
DSSHRTR
F3:
(SEQ ID NO: 818)
TSSNRKT
F4:
(SEQ ID NO: 819)
AQWTRAC
F5:
(SEQ ID NO: 820)
RKQTRTT
F6:
(SEQ ID NO: 821)
HRSSLRR;
18)
F1:
(SEQ ID NO: 822)
QSAHRKN
F2:
(SEQ ID NO: 823)
TSSNRKT
F3:
(SEQ ID NO: 824)
RSDNLSA
F4:
(SEQ ID NO: 825)
RNNDRKT
F5:
(SEQ ID NO: 826)
TSGSLSR
F6:
(SEQ ID NO: 827)
QAGHLAK;
19)
F1:
(SEQ ID NO: 828)
RSDHLSQ
F2:
(SEQ ID NO: 829)
ASSTRTK
F3:
(SEQ ID NO: 830)
RSDDLTR
F4:
(SEQ ID NO: 831)
QKSNLSS
F5:
(SEQ ID NO: 832)
QSANRTT
F6:
(SEQ ID NO: 833)
QNATRTK;
20)
F1:
(SEQ ID NO: 834)
RSDTLSE
F2:
(SEQ ID NO: 835)
RRWTLVG
F3:
(SEQ ID NO: 836)
DRSNLSR
F4:
(SEQ ID NO: 837)
QSGDLTR
F5:
(SEQ ID NO: 838)
QSSDLSR
F6:
(SEQ ID NO: 839)
YHWYLKK;
21)
F1:
(SEQ ID NO: 840)
RSANLAR
F2:
(SEQ ID NO: 841)
RSDNLRE
F3:
(SEQ ID NO: 842)
RPYTLRL
F4:
(SEQ ID NO: 843)
HRSNLNK
F5:
(SEQ ID NO: 844)
QSGSLTR
F6:
(SEQ ID NO: 845)
TSANLSR;
22)
F1:
(SEQ ID NO: 846)
RSDDLVR
F2:
(SEQ ID NO: 847)
TSGSLVR
F3:
(SEQ ID NO: 848)
RSDKLVR
F4:
(SEQ ID NO: 849)
RSDELVR
F5:
(SEQ ID NO: 850)
TSHSLTE
F6:
(SEQ ID NO: 851)
RADNLTE;
23)
F1:
(SEQ ID NO: 852)
ERSHLRE
F2:
(SEQ ID NO: 853)
TSHSLTE
F3:
(SEQ ID NO: 854)
QAGHLAS
F4:
(SEQ ID NO: 855)
TSHSLTE
F5:
(SEQ ID NO: 856)
DPGHLVR
F6:
(SEQ ID NO: 857)
TSGNLVR;
24)
F1:
(SEQ ID NO: 858)
RADNLTE
F2:
(SEQ ID NO: 859)
TSGSLVR
F3:
(SEQ ID NO: 860)
RKDNLKN
F4:
(SEQ ID NO: 861)
QSSSLVR
F5:
(SEQ ID NO: 862)
RSDKLVR
F6:
(SEQ ID NO: 863)
DSGNLRV;
25)
F1:
(SEQ ID NO: 864)
QSSSLVR
F2:
(SEQ ID NO: 865)
QSGDLRR
F3:
(SEQ ID NO: 866)
RSDERKR
F4:
(SEQ ID NO: 867)
HRTTLTN
F5:
(SEQ ID NO: 868)
RSDHLTN
F6:
(SEQ ID NO: 869)
TSGELVR;
26)
F1:
(SEQ ID NO: 870)
QSGDLRR
F2:
(SEQ ID NO: 871)
RSDERKR
F3:
(SEQ ID NO: 872)
HRTTLTN
F4:
(SEQ ID NO: 873)
RSDHLTN
F5:
(SEQ ID NO: 874)
TSGELVR
F6:
(SEQ ID NO: 875)
RSDDLVR;
27)
F1:
(SEQ ID NO: 876)
QRAHLER
F2:
(SEQ ID NO: 877)
QLAHLRA
F3:
(SEQ ID NO: 878)
DPGHLVR
F4:
(SEQ ID NO: 879)
RRSACRR
F5:
(SEQ ID NO: 880)
RSDHLTT
F6:
(SEQ ID NO: 881)
QSSSLVR;
and
28)
F1:
(SEQ ID NO: 882)
QSSNLVR
F2:
(SEQ ID NO: 883)
RSDDLVR
F3:
(SEQ ID NO: 884)
THLDLIR
F4:
(SEQ ID NO: 885)
TSGNLTE
F5:
(SEQ ID NO: 886)
RRSACRR
F6:
(SEQ ID NO: 887)
RNDTLTE.

[0930] 330. The eZFP of any of embodiments 313-329, wherein the zinc finger protein comprises six zinc fingers denoted F1 through F6 in order from N-terminus to C-terminus,

and wherein the amino acid sequence of each zinc finger recognition region is as follows:

F1:
(SEQ ID NO: 822)
QSAHRKN
F2:
(SEQ ID NO: 823)
TSSNRKT
F3:
(SEQ ID NO: 824)
RSDNLSA
F4:
(SEQ ID NO: 825)
RNNDRKT
F5:
(SEQ ID NO: 826)
TSGSLSR
F6:
(SEQ ID NO: 827)
QAGHLAK.

[0931] 331. The eZFP of any of embodiments 313-329, wherein the zinc finger protein comprises six zinc fingers denoted F1 through F6 in order from N-terminus to C-terminus,

and wherein the amino acid sequence of each zinc finger recognition region is as follows:

F1:
(SEQ ID NO: 828)
RSDHLSQ
F2:
(SEQ ID NO: 829)
ASSTRTK
F3:
(SEQ ID NO: 830)
RSDDLTR
F4:
(SEQ ID NO: 831)
QKSNLSS
F5:
(SEQ ID NO: 832)
QSANRTT
F6:
(SEQ ID NO: 833)
QNATRTK.

[0932] 332. The eZFP of any of embodiments 313-329, wherein the zinc finger protein comprises six zinc fingers denoted F1 through F6 in order from N-terminus to C-terminus,

and wherein the amino acid sequence of each zinc finger recognition region is as follows:

F1:
(SEQ ID NO: 864)
QSSSLVR
F2:
(SEQ ID NO: 865)
QSGDLRR
F3:
(SEQ ID NO: 866)
RSDERKR
F4:
(SEQ ID NO: 867)
HRTTLTN
F5:
(SEQ ID NO: 868)
RSDHLTN
F6:
(SEQ ID NO: 869)
TSGELVR.

[0933] 333. An eZFP that binds to a target site in one or more HBV genes or regulatory elements thereof, wherein the zinc finger protein comprises six zinc fingers denoted F1 through F6 in order from N-terminus to C-terminus,

and wherein the amino acid sequence of each zinc finger recognition region is as follows:

1)
F1:
(SEQ ID NO: 720)
SEADRSR
F2:
(SEQ ID NO: 721)
DRSNLTR
F3:
(SEQ ID NO: 722)
QSSDLSR
F4:
(SEQ ID NO: 723)
YHWYLKK
F5:
(SEQ ID NO: 724)
RSDSLSV
F6:
(SEQ ID NO: 725)
QNANRKT;
2)
F1:
(SEQ ID NO: 726)
RSDVLST
F2:
(SEQ ID NO: 727)
DNSSRTR
F3:
(SEQ ID NO: 728)
RPYTLRL
F4:
(SEQ ID NO: 729)
DSSHRTR
F5:
(SEQ ID NO: 730)
RSDHLSQ
F6:
(SEQ ID NO: 731)
DSSHRTR;
3)
F1:
(SEQ ID NO: 732)
RSDHLSQ
F2:
(SEQ ID NO: 733)
QSADRTK
F3:
(SEQ ID NO: 734)
RSDHLSQ
F4:
(SEQ ID NO: 735)
RRSDLKR
F5:
(SEQ ID NO: 736)
RSDHLSR
F6:
(SEQ ID NO: 737)
QSSDLRR;
4)
F1:
(SEQ ID NO: 738)
RSDNLSE
F2:
(SEQ ID NO: 739)
TSSNRKT
F3:
(SEQ ID NO: 740)
DRSHLTR
F4:
(SEQ ID NO: 741)
RSDALTQ
F5:
(SEQ ID NO: 742)
DRSALAR
F6:
(SEQ ID NO: 743)
RRFTLSK;
5)
F1:
(SEQ ID NO: 744)
RSDHLSE
F2:
(SEQ ID NO: 745)
QYSGRYY
F3:
(SEQ ID NO: 746)
HGQTLNE
F4:
(SEQ ID NO: 747)
QSGNLAR
F5:
(SEQ ID NO: 748)
RSDSLLR
F6:
(SEQ ID NO: 749)
CREYRGK;
6)
F1:
(SEQ ID NO: 750)
QSANRTT
F2:
(SEQ ID NO: 751)
RSANLTR
F3:
(SEQ ID NO: 752)
RSDVLSE
F4:
(SEQ ID NO: 753)
TSGHLSR
F5:
(SEQ ID NO: 754)
QSSDLSR,
F6:
(SEQ ID NO: 755)
QWSTRKR;
7)
F1:
(SEQ ID NO: 756)
QSGNLAR
F2:
(SEQ ID NO: 757)
ATCCLAH
F3:
(SEQ ID NO: 758)
RWQYLPT
F4:
(SEQ ID NO: 759)
DRSALAR
F5:
(SEQ ID NO: 760)
RSDNLSE
F6:
(SEQ ID NO: 761)
KRCNLRC;
8)
F1:
(SEQ ID NO: 762)
NPANLTR
F2:
(SEQ ID NO: 763)
QNATRTK
F3:
(SEQ ID NO: 764)
QSGHLAR
F4:
(SEQ ID NO: 765)
NRHDRAK
F5:
(SEQ ID NO: 766)
RSDHLSE,
F6:
(SEQ ID NO: 767)
QRRSRYK;
9)
F1:
(SEQ ID NO: 768)
QSSDLSR
F2:
(SEQ ID NO: 769)
HRSTRNR
F3:
(SEQ ID NO: 770)
RSDVLSA
F4:
(SEQ ID NO: 771)
DSRTRKN
F5:
(SEQ ID NO: 772)
QSGSLTR
F6:
(SEQ ID NO: 773)
DQSGLAH;
10)
F1:
(SEQ ID NO: 774)
QNPAQWR
F2:
(SEQ ID NO: 775)
RSADLSR
F3:
(SEQ ID NO: 776)
TSGSLSR
F4:
(SEQ ID NO: 777)
RSDHLSR
F5:
(SEQ ID NO: 778)
RSDSLLR
F6:
(SEQ ID NO: 779)
QSYDRFQ;
11)
F1:
(SEQ ID NO: 780)
TSGSLSR
F2:
(SEQ ID NO: 781)
RSDHLSR
F3:
(SEQ ID NO: 782)
RSDSLLR
F4:
(SEQ ID NO: 783)
QSYDRFQ
F5:
(SEQ ID NO: 784)
RSDNLST
F6:
(SEQ ID NO: 785)
DNRDRIK;
12)
F1:
(SEQ ID NO: 786)
DRSNLSR
F2:
(SEQ ID NO: 787)
LRQNLIM
F3:
(SEQ ID NO: 788)
ERGTLAR
F4:
(SEQ ID NO: 789)
RSDALTQ
F5:
(SEQ ID NO: 790)
RSDSLSQ
F6:
(SEQ ID NO: 791)
RKADRTR;
13)
F1:
(SEQ ID NO: 792)
QYCCLTN
F2:
(SEQ ID NO: 793)
TSGNLTR
F3:
(SEQ ID NO: 794)
QSSDLSR
F4:
(SEQ ID NO: 795)
FRYYLKR
F5:
(SEQ ID NO: 796)
QSGDLTR
F6:
(SEQ ID NO: 797)
DKGNLTK;
14)
F1:
(SEQ ID NO: 798)
TSGSLSR
F2:
(SEQ ID NO: 799)
RSDNLTT
F3:
(SEQ ID NO: 800)
QSGNLAR
F4:
(SEQ ID NO: 801)
DRTTLMR
F5:
(SEQ ID NO: 802)
QSGHLAR
F6:
(SEQ ID NO: 803)
QLTHLNS;
15)
F1:
(SEQ ID NO: 804)
IKHDLHR
F2:
(SEQ ID NO: 805)
RSANLTR
F3:
(SEQ ID NO: 806)
RSDNLAR
F4:
(SEQ ID NO: 807)
QNVSRPR
F5:
(SEQ ID NO: 808)
RSDDLSK
F6:
(SEQ ID NO: 809)
DSSHRTR;
16)
F1:
(SEQ ID NO: 810)
RSDNLAR
F2:
(SEQ ID NO: 811)
QNVSRPR
F3:
(SEQ ID NO: 812)
RSDDLSK
F4:
(SEQ ID NO: 813)
DSSHRTR
F5:
(SEQ ID NO: 814)
TSSNRKT
F6:
(SEQ ID NO: 815)
AQWTRAC;
17)
F1:
(SEQ ID NO: 816)
RSDDLSK
F2:
(SEQ ID NO: 817)
DSSHRTR
F3:
(SEQ ID NO: 818)
TSSNRKT
F4:
(SEQ ID NO: 819)
AQWTRAC
F5:
(SEQ ID NO: 820)
RKQTRTT
F6:
(SEQ ID NO: 821)
HRSSLRR;
18)
F1:
(SEQ ID NO: 822)
QSAHRKN
F2:
(SEQ ID NO: 823)
TSSNRKT
F3:
(SEQ ID NO: 824)
RSDNLSA
F4:
(SEQ ID NO: 825)
RNNDRKT
F5:
(SEQ ID NO: 826)
TSGSLSR
F6:
(SEQ ID NO: 827)
QAGHLAK;
19)
F1:
(SEQ ID NO: 828)
RSDHLSQ
F2:
(SEQ ID NO: 829)
ASSTRTK
F3:
(SEQ ID NO: 830)
RSDDLTR
F4:
(SEQ ID NO: 831)
QKSNLSS
F5:
(SEQ ID NO: 832)
QSANRTT
F6:
(SEQ ID NO: 833)
QNATRTK;
20)
F1:
(SEQ ID NO: 834)
RSDTLSE
F2:
(SEQ ID NO: 835)
RRWTLVG
F3:
(SEQ ID NO: 836)
DRSNLSR
F4:
(SEQ ID NO: 837)
QSGDLTR
F5:
(SEQ ID NO: 838)
QSSDLSR
F6:
(SEQ ID NO: 839)
YHWYLKK;
21)
F1:
(SEQ ID NO: 840)
RSANLAR
F2:
(SEQ ID NO: 841)
RSDNLRE
F3:
(SEQ ID NO: 842)
RPYTLRL
F4:
(SEQ ID NO: 843)
HRSNLNK
F5:
(SEQ ID NO: 844)
QSGSLTR
F6:
(SEQ ID NO: 845)
TSANLSR;
22)
F1:
(SEQ ID NO: 846)
RSDDLVR
F2:
(SEQ ID NO: 847)
TSGSLVR
F3:
(SEQ ID NO: 848)
RSDKLVR
F4:
(SEQ ID NO: 849)
RSDELVR
F5:
(SEQ ID NO: 850)
TSHSLTE
F6:
(SEQ ID NO: 851)
RADNLTE;
23)
F1:
(SEQ ID NO: 852)
ERSHLRE
F2:
(SEQ ID NO: 853)
TSHSLTE
F3:
(SEQ ID NO: 854)
QAGHLAS
F4:
(SEQ ID NO: 855)
TSHSLTE
F5:
(SEQ ID NO: 856)
DPGHLVR
F6:
(SEQ ID NO: 857)
TSGNLVR;
24)
F1:
(SEQ ID NO: 858)
RADNLTE
F2:
(SEQ ID NO: 859)
TSGSLVR
F3:
(SEQ ID NO: 860)
RKDNLKN
F4:
(SEQ ID NO: 861)
QSSSLVR
F5:
(SEQ ID NO: 862)
RSDKLVR
F6:
(SEQ ID NO: 863)
DSGNLRV;
25)
F1:
(SEQ ID NO: 864)
QSSSLVR
F2:
(SEQ ID NO: 865)
QSGDLRR
F3:
(SEQ ID NO: 866)
RSDERKR
F4:
(SEQ ID NO: 867)
HRTTLTN
F5:
(SEQ ID NO: 868)
RSDHLTN
F6:
(SEQ ID NO: 869)
TSGELVR;
26)
F1:
(SEQ ID NO: 870)
QSGDLRR
F2:
(SEQ ID NO: 871)
RSDERKR
F3:
(SEQ ID NO: 872)
HRTTLTN
F4:
(SEQ ID NO: 873)
RSDHLTN
F5:
(SEQ ID NO: 874)
TSGELVR
F6:
(SEQ ID NO: 875)
RSDDLVR;
27)
F1:
(SEQ ID NO: 876)
QRAHLER
F2:
(SEQ ID NO: 877)
QLAHLRA
F3:
(SEQ ID NO: 878)
DPGHLVR
F4:
(SEQ ID NO: 879)
RRSACRR
F5:
(SEQ ID NO: 880)
RSDHLTT
F6:
(SEQ ID NO: 881)
QSSSLVR;
and
28)
F1:
(SEQ ID NO: 882)
QSSNLVR
F2:
(SEQ ID NO: 883)
RSDDLVR
F3:
(SEQ ID NO: 884)
THLDLIR
F4:
(SEQ ID NO: 885)
TSGNLTE
F5:
(SEQ ID NO: 886)
RRSACRR
F6:
(SEQ ID NO: 887)
RNDTLTE.

[0934] 334. The eZFP of any of embodiments 313-333, wherein the engineered zinc finger protein comprises the sequence set forth in any one of SEQ ID NOS: 692-719, or a portion thereof, or an amino acid sequence that has at least 90%, 91%, 92%, 93%, 94%, 95%, 96%, 97%, 98%, or 99% sequence identity thereto.

[0935] 335. The eZFP of any of embodiments 313-334, wherein the engineered zinc finger protein is encoded by the sequence set forth in any one of SEQ ID NOS:888-915, or a portion thereof, or nucleotide sequence that has at least 90%, 91%, 92%, 93%, 94%, 95%, 96%, 97%, 98%, or 99% sequence identity thereto.

[0936] 336. An engineered zinc finger protein that binds to a target site in one or more HBV genes or regulatory elements thereof, wherein the zinc finger protein comprises six zinc fingers denoted F1 through F6 in order from N-terminus to C-terminus,

and wherein the amino acid sequence of each zinc finger recognition region is as follows:

F1:
(SEQ ID NO: 822)
QSAHRKN
F2:
(SEQ ID NO: 823)
TSSNRKT
F3:
(SEQ ID NO: 824)
RSDNLSA
F4:
(SEQ ID NO: 825)
RNNDRKT
F5:
(SEQ ID NO: 826)
TSGSLSR
F6:
(SEQ ID NO: 827)
QAGHLAK.

[0937] 337. The eZFP of any of embodiments 313-336, wherein the engineered zinc finger protein comprises the sequence set forth in SEQ ID NO: 709, or a portion thereof, or an amino acid sequence that has at least 90%, 91%, 92%, 93%, 94%, 95%, 96%, 97%, 98%, or 99% sequence identity thereto.

[0938] 338. The eZFP of any of embodiments 313-337, wherein the engineered zinc finger protein comprises the sequence set forth in any one of SEQ ID NOS: 709.

[0939] 339. The eZFP of any of embodiments 313-338, wherein the engineered zinc finger protein is encoded by the sequence set forth in SEQ ID NO:905, or a portion thereof, or nucleotide sequence that has at least 90%, 91%, 92%, 93%, 94%, 95%, 96%, 97%, 98%, or 99% sequence identity thereto.

[0940] 340. The eZFP of any of embodiments 313-339, wherein the engineered zinc finger protein is encoded by the sequence set forth in any one of SEQ ID NOS:905.

[0941] 341. An engineered zinc finger protein that binds to a target site in one or more HBV genes or regulatory elements thereof, wherein the zinc finger protein comprises six zinc fingers denoted F1 through F6 in order from N-terminus to C-terminus,

and wherein the amino acid sequence of each zinc finger recognition region is as follows:

F1:
(SEQ ID NO: 828)
RSDHLSQ
F2:
(SEQ ID NO: 829)
ASSTRTK
F3:
(SEQ ID NO: 830)
RSDDLTR
F4:
(SEQ ID NO: 831)
QKSNLSS
F5:
(SEQ ID NO: 832)
QSANRTT
F6:
(SEQ ID NO: 833)
QNATRTK.

[0942] 342. The eZFP of any of embodiments 313-335 and 341, wherein the engineered zinc finger protein comprises the sequence set forth in SEQ ID NO: 710, or a portion thereof, or an amino acid sequence that has at least 90%, 91%, 92%, 93%, 94%, 95%, 96%, 97%, 98%, or 99% sequence identity thereto.

[0943] 343. The eZFP of any of embodiments 313-335, 341 and 342, wherein the engineered zinc finger protein comprises the sequence set forth in any one of SEQ ID NOS: 710

[0944] 344. The eZFP of any of embodiments 313-335 and 341-343, wherein the engineered zinc finger protein is encoded by the sequence set forth in SEQ ID NO:906, or a portion thereof, or nucleotide sequence that has at least 90%, 91%, 92%, 93%, 94%, 95%, 96%, 97%, 98%, or 99% sequence identity thereto.

[0945] 345. The eZFP of any of embodiments 313-335 and 341-344, wherein the engineered zinc finger protein is encoded by the sequence set forth in any one of SEQ ID NOS: 906.

[0946] 346. An engineered zinc finger protein that binds to a target site in one or more HBV genes or regulatory elements thereof, wherein the zinc finger protein comprises six zinc fingers denoted F1 through F6 in order from N-terminus to C-terminus,

and wherein the amino acid sequence of each zinc finger recognition region is as follows:

F1:
(SEQ ID NO: 864)
QSSSLVR
F2:
(SEQ ID NO: 865)
QSGDLRR
F3:
(SEQ ID NO: 866)
RSDERKR
F4:
(SEQ ID NO: 867)
HRTTLTN
F5:
(SEQ ID NO: 868)
RSDHLTN
F6:
(SEQ ID NO: 869)
TSGELVR.

[0947] 347. The eZFP of any of embodiments 313-335 and 346, wherein the engineered zinc finger protein comprises the sequence set forth in SEQ ID NO: 716, or a portion thereof, or an amino acid sequence that has at least 90%, 91%, 92%, 93%, 94%, 95%, 96%, 97%, 98%, or 99% sequence identity thereto.

[0948] 348. The eZFP of any of embodiments 313-335, 346 and 347, wherein the engineered zinc finger protein comprises the sequence set forth in any one of SEQ ID NOS: 716.

[0949] 349. The eZFP of any of embodiments 313-335 and 346-348, wherein the engineered zinc finger protein is encoded by the sequence set forth in SEQ ID NO:912, or a portion thereof, or nucleotide sequence that has at least 90%, 91%, 92%, 93%, 94%, 95%, 96%, 97%, 98%, or 99% sequence identity thereto.

[0950] 350. The eZFP of any of embodiments 313-335 and 346-349, wherein the engineered zinc finger protein is encoded by the sequence set forth in any one of SEQ ID NOS:912.

[0951] Also among the provided embodiments are:

[0952] 1. An epigenetic-modifying DNA-targeting system comprising at least one DNA-targeting module for repressing transcription of one or more Hepatitis B viral (HBV) genes, wherein each of the at least one DNA-targeting module comprises a fusion protein comprising:
[0953] (a) a DNA-binding domain for targeting to a target site in a Hepatitis B viral DNA sequence, wherein the target site is within a target region that has a sequence corresponding to the sequence located at base pairs between 1033 bp-1749 bp in a Hepatitis B viral sequence with reference to nucleotide positions of SEQ ID NO: 650; and
[0954] (b) at least one transcriptional repressor effector domain.

[0955] 2. The epigenetic-modifying DNA-targeting system of embodiment 1, wherein the target site is within a target region located within 300 base pairs upstream of the hepatitis B X protein (HBx) start codon.

[0956] 3. An epigenetic-modifying DNA-targeting system comprising at least one DNA-targeting module for repressing transcription of a Hepatitis B viral (HBV) gene, wherein the DNA-targeting module comprises a fusion protein comprising:
[0957] (a) a DNA-binding domain for targeting to a target site within a target region spanning within 300 base pairs upstream of the hepatitis B X protein (HBx) start codon; and
[0958] (b) at least one transcriptional repressor effector domain.

[0959] 4. The epigenetic-modifying DNA-targeting system of any of embodiments 1-3, wherein the target site is positioned in the HBx basal core promoter region.

[0960] 5. The epigenetic-modifying DNA-targeting system of any of embodiments 1-3, wherein the target site is positioned within the HBx promoter/Enhancer region.

[0961] 6. The epigenetic-modifying DNA-targeting system of any of embodiments 1-5, wherein the target site is within a target region spanning within 150 base pairs upstream of the hepatitis B X protein (HBx) start codon.

[0962] 7. The epigenetic-modifying DNA-targeting system of any of embodiments 1-6, wherein the target site is within a target region that has a sequence corresponding to the sequence located at base pairs between 1255-1302 bp with reference to the HBV genome set forth in SEQ ID NO: 650.

[0963] 8. The epigenetic-modifying DNA-targeting system of any of embodiments 1-7, wherein the target site is within a target region that has a sequence corresponding to the sequence located at base pairs between 1260-1300 bp with reference to the HBV genome set forth in SEQ ID NO: 650.

[0964] 9. The epigenetic-modifying DNA-targeting system of any of embodiments 1-8, wherein the target site comprises the sequence set forth in SEQ ID NO: 22 or SEQ ID NO:63, a contiguous portion thereof of at least 14 nucleotides, or a complementary sequence of any of the foregoing.

[0965] 10. The epigenetic-modifying DNA-targeting system of any of embodiments 1-9, wherein the at least one DNA-binding domain comprises a Clustered Regularly Interspaced Short Palindromic Repeats associated (Cas)-guide RNA (gRNA) combination comprising (a) a deactivated Cas (dCas) and (b) at least one gRNA.

[0966] 11. The epigenetic-modifying DNA-targeting system of embodiment 10, wherein the dCas is a dCas9 protein.

[0967] 12. The epigenetic-modifying DNA-targeting system of embodiment 11, wherein the dCas9 is a Streptococcus pyogenes dCas9 (dSpCas9) protein that comprises at least one amino acid mutation selected from D10A and H840A, with reference to numbering of positions of SEQ ID NO: 598.

[0968] 13. The epigenetic-modifying DNA-targeting system of any of embodiments 10-12, wherein the gRNA comprises the sequence set forth in SEQ ID NO: 217, a contiguous portion thereof of at least 14 nucleotides, or a complementary sequence of any of the foregoing.

[0969] 14. The epigenetic-modifying DNA-targeting system of any of embodiments 10-13, wherein the gRNA is set forth in SEQ ID NO: 412.

[0970] 15. The epigenetic-modifying DNA-targeting system of any of embodiments 10-12, wherein the gRNA comprises the sequence set forth in SEQ ID NO: 258, a contiguous portion thereof of at least 14 nucleotides, or a complementary sequence of any of the foregoing.

[0971] 16. The epigenetic-modifying DNA-targeting system of any of embodiments 10-12 and 15, wherein the gRNA is set forth in SEQ ID NO: 453.

[0972] 17. The epigenetic-modifying DNA-targeting system of any of embodiments 1-9, wherein the at least one DNA-binding domain comprises an engineered zinc finger protein (eZFP).

[0973] 18. The epigenetic-modifying DNA-targeting system of any of embodiments 1-9 and 17, wherein the target site comprises the nucleotide sequence set forth in any one of SEQ ID NOS: 1045, 1046, 1052, a contiguous portion thereof of at least 12 nt, or a complementary sequence of any of the foregoing.

[0974] 19. The epigenetic-modifying DNA-targeting system of any of embodiments 17-18, wherein the zinc finger protein comprises six zinc fingers denoted F1 through F6 in order from N-terminus to C-terminus, and wherein the amino acid sequence of each zinc finger recognition region is as follows:

(A)
F1:
(SEQ ID NO: 822)
QSAHRKN
F2:
(SEQ ID NO: 823)
TSSNRKT
F3:
(SEQ ID NO: 824)
RSDNLSA
F4:
(SEQ ID NO: 825)
RNNDRKT
F5:
(SEQ ID NO: 826)
TSGSLSR
F6:
(SEQ ID NO: 827)
QAGHLAK;
(B)
F1:
(SEQ ID NO: 828)
RSDHLSQ
F2:
(SEQ ID NO: 829)
ASSTRTK
F3:
(SEQ ID NO: 830)
RSDDLTR
F4:
(SEQ ID NO: 831)
QKSNLSS
F5:
(SEQ ID NO: 832)
QSANRTT
F6:
(SEQ ID NO: 833)
QNATRTK;
or
(C)
F1:
(SEQ ID NO: 864)
QSSSLVR
F2:
(SEQ ID NO: 865)
QSGDLRR
F3:
(SEQ ID NO: 866)
RSDERKR
F4:
(SEQ ID NO: 867)
HRTTLTN
F5:
(SEQ ID NO: 868)
RSDHLTN
F6:
(SEQ ID NO: 869)
TSGELVR.

[0975] 20. The epigenetic-modifying DNA-targeting system of any of embodiments 17-19, wherein the eZFP comprises the sequence set forth in SEQ ID NO: 709, SEQ ID NO: 710 or SEQ ID NO:716, or an amino acid sequence that has at least 90% sequence identity thereto.

[0976] 21. The epigenetic-modifying DNA-targeting system of any of embodiments 1-20, wherein at least one effector domain is a DNA methyltransferase.

[0977] 22. The epigenetic modifying DNA-targeting system of any of embodiments 1-21, wherein at least one effector domain comprises a DNA methyltransferase and a repressor domain capable of recruiting heterochromatin inducing factors.

[0978] 23. The epigenetic modifying DNA-targeting system of any of embodiments 1-22, wherein at least one effector domain comprises a DNA methyltransferase and a histone methyltransferase.

[0979] 24. The epigenetic-modifying DNA-targeting system of any of embodiments 1-23, wherein at least one effector domain is selected from a KRAB repressor domain, ERF repressor domain, Mxi1 repressor domain, SID4X repressor domain, Mad-SID repressor domain. LSD1 repressor domain, or DNMT3A, DNMT3A-3L, DNMT3A/L-KRAB fusion repressor domain, DNMT3B domain binding protein or LSD1 repressor domain, or variant of any of the foregoing.

[0980] 25. A polynucleotide encoding the epigenetic-modifying DNA-targeting system of any of embodiments 1-24 or a fusion protein of the DNA-targeting system of any of embodiments 1-24, or a portion or a component of any of the foregoing.

[0981] 26. A vector comprising the polynucleotide of embodiment 25.

[0982] Also among the provided embodiments are:

[0983] 1. An epigenetic-modifying DNA-targeting system comprising at least one DNA-targeting module for repressing transcription of one or more Hepatitis B viral (HBV) genes, wherein each of at least one DNA-targeting module comprises a fusion protein comprising:
[0984] (a) a DNA-binding domain for targeting to a target site in a Hepatitis B viral DNA sequence; and
[0985] (b) a transcriptional repressor effector domain comprising a KRAB domain and a DNMT3A/L domain.

[0986] 2. The epigenetic-modifying DNA-targeting system of embodiment 1, wherein the KRAB domain comprises the sequence set forth in SEQ ID NO: 590, or an amino acid sequence that has at least 90% sequence identity to SEQ ID NO:590.

[0987] 3. The epigenetic-modifying DNA-targeting system of embodiment 1 or 2, wherein the DNMT3A/L domain comprises the sequence set forth in SEQ ID NO: 651, or an amino acid sequence that has at least 90% sequence identity to SEQ ID NO:651.

[0988] 4. An epigenetic-modifying DNA-targeting system comprising at least one DNA-targeting module for repressing transcription of one or more Hepatitis B viral (HBV) genes, wherein each of at least one DNA-targeting module comprises a fusion protein comprising:
[0989] (a) a DNA-binding domain for targeting to a target site in a Hepatitis B viral DNA sequence; and
[0990] (b) a transcriptional repressor effector domain comprising a KRAB domain and a DNMT3A/L domain, wherein the KRAB domain comprises the sequence set forth in SEQ ID NO: 590, or an amino acid sequence that has at least 90% sequence identity to SEQ ID NO:590 and the DNMT3A/L domain comprises the sequence set forth in SEQ ID NO: 651, or an amino acid sequence that has at least 90% sequence identity to SEQ ID NO:651.

[0991] 5. The epigenetic-modifying DNA-targeting system of any of embodiments 1-4, wherein the KRAB domain and DNMT3A/L domain is independently fused to the N-terminus, the C-terminus, or both the N-terminus and the C-terminus, of the DNA-binding domain.

[0992] 6. The epigenetic-modifying DNA-targeting system of any of embodiments 1-5, wherein the fusion protein further comprises one or more nuclear localization signals (NIS).

[0993] 7. The epigenetic-modifying DNA-targeting system of embodiment 6, wherein the fusion protein further comprises one or more linkers connecting two or more of: the DNA-binding domain, the KRAB domain, the DNMT3A/L domain, and the one or more nuclear localization signals.

[0994] 8. The epigenetic-modifying DNA-targeting system of any of embodiments 1-7, wherein the Hepatitis B viral DNA sequence is an HBV gene or a regulatory element thereof.

[0995] 9. The epigenetic-modifying DNA-targeting system of any of embodiments 1-8, wherein the target site is present in a covalently closed circular DNA (cccDNA) form, relaxed circular DNA (rcDNA) form and/or is in HBV viral DNA integrated in the human genomic DNA.

[0996] 10. The epigenetic-modifying DNA-targeting system of any of embodiments 1-9, wherein the target site is present at or near a gene or a regulatory element thereof involved in controlling HBV replication and/or HBV transcription, wherein the gene is a polymerase gene, S-family gene, X-gene, or core family gene.

[0997] 11. The epigenetic-modifying DNA-targeting system of any of embodiments 1-10, wherein at least one target site is in gene or regulatory element thereof of the X-gene encoding Hepatitis B Virus Protein X (HBx).

[0998] 12. The epigenetic-modifying DNA-targeting system of embodiment 10, wherein the regulatory element is a promoter region.

[0999] 13. The epigenetic-modifying DNA-targeting system of embodiment 12, wherein the promoter region is a pre-S1 promoter, a pre-S2 promoter, X promoter, or basal core promoter.

[1000] 14. The epigenetic-modifying DNA-targeting system of embodiment 10, wherein the regulatory element is an enhancer region.

[1001] 15. The epigenetic-modifying DNA-targeting system of embodiment 14, wherein the enhancer region is an Enh1 or an Enh2 enhancer region.

[1002] 16. The epigenetic-modifying DNA-targeting system of any of embodiments 1-15, wherein the target site is at least 70% homologous to at least 1000 Hepatitis B viral genomes.

[1003] 17. The epigenetic-modifying DNA-targeting system of any of embodiments 1-16, wherein at least one DNA-binding domain comprises a Clustered Regularly Interspaced Short Palindromic Repeats associated (Cas)-guide RNA (gRNA) combination comprising (a) a Cas protein or a variant thereof and (b) at least one gRNA; a zinc finger protein (ZFP); a transcription activator-like effector (TALE); a meganuclease; a homing endonuclease; or an I-SceI enzyme or a variant thereof.

[1004] 18. The epigenetic-modifying DNA-targeting system of any of embodiments 1-18, wherein the DNA-binding domain is Cas-gRNA combination, wherein the Cas is a deactivated Cas (dCas) protein.

[1005] 19. The epigenetic-modifying DNA-targeting system of embodiment 18, wherein the dCas is a deactivated Cas9 (dCas9) protein.

[1006] 20. The epigenetic-modifying DNA-targeting system of embodiment 19, wherein the dCas9 is a Staphylococcus aureus dCas9 protein (dSaCas9) that comprises at least one amino acid mutation selected from D10A and N580A, with reference to numbering of positions of SEQ ID NO: 596.

[1007] 21. The epigenetic-modifying DNA-targeting system of embodiment 19, wherein the dCas9 is a Streptococcus pyogenes dCas9 (dSpCas9) protein that comprises at least one amino acid mutation selected from D10A and H840A, with reference to numbering of positions of SEQ ID NO: 598.

[1008] 22. An epigenetic-modifying DNA-targeting system comprising,
[1009] (a) a fusion protein comprising (i) a Clustered Regularly Interspaced Short Palindromic Repeats associated protein 9 (Cas9) that is a deactivated Cas9 (dCas9) comprising at least one amino acid mutation selected from D10A and N580A, with reference to numbering of positions of SEQ ID NO: 596 and (ii) a transcriptional repressor effector domain comprising a KRAB domain and a DNMT3A/L domain, wherein the KRAB domain comprises an amino acid sequence that has at least 90% sequence identity to SEQ ID NO:590 and the DNMT3A/L domain comprises an amino acid sequence that has at least 90% sequence identity to SEQ ID NO:651; and
[1010] (b) a gRNA for targeting to a target site in a Hepatitis B viral DNA sequence.

[1011] 23. The epigenetic-modifying DNA-targeting system of embodiment 22, wherein the target site is in a gene or regulatory element thereof of the X-gene encoding Hepatitis B Virus Protein X (HBx).

[1012] 24. The epigenetic-modifying DNA-targeting system of any of embodiments 1-18, wherein at least one DNA-binding domain comprises an engineered zinc finger protein (eZFP).

[1013] 25. An epigenetic-modifying DNA-targeting system comprising, a fusion protein comprising (i) an engineered zinc finger protein (eZFP) for targeting to a target site in a Hepatitis B viral DNA sequence and (ii) a transcriptional repressor effector domain comprising a KRAB domain and a DNMT3A/L domain, wherein the KRAB domain comprises an amino acid sequence that has at least 90% sequence identity to SEQ ID NO:590 and the DNMT3A/L domain comprises an amino acid sequence that has at least 90% sequence identity to SEQ ID NO:651.

[1014] 26. The epigenetic-modifying DNA-targeting system of embodiment 25, wherein the target site is in a gene or regulatory element thereof of the X-gene encoding Hepatitis B Virus Protein X (HBx).

[1015] 27. The epigenetic-modifying DNA-targeting system of any embodiments 1-26, wherein the DNA-targeting system targets at least 70% of all Hepatitis B viral genomes.

[1016] 28. A polynucleotide encoding the epigenetic-modifying DNA-targeting system of any of embodiments 1-27 or a fusion protein of the DNA-targeting system of any of embodiments 1-27, or a portion or a component of any of the foregoing.

[1017] 29. A vector comprising the polynucleotide of embodiment 28.

### VIII. EXAMPLES

[1018] The following examples are included for illustrative purposes only and are not intended to limit the scope of the invention.

### Example 1: Design of gRNAs Targeting Hepatitis B Viral Genes and Regulatory Element Thereof Associated with Viral Replication and Transcription

[1019] gRNAs were designed for targeting Hepatitis B viral (HBV) genes and regulatory element thereof associated with viral replication and transcription.

[1020] Computational analysis was used to generate a master gRNA protospacer list (target sites) from 6939 different HBV genomes (genotypes A-E). The master gRNA list contained all 110, 438 unique protospacer-PAM sequences (target sites) found across all the genomes (defined by “[N](×20)-NGG”). Next, the protospacer sequences (target sites) were aligned back to all the 6939 HBV genomes. The protospacer sequences were then organized into three categories based on homology and mismatches in the 12 bases on the 5′ end of the protospacer adjacent motif (PAM), as represented by ‘n’ in ‘nnnnnnnnnnnnNNNNNNNN-NGG’: 1) protospacer present with no mismatches (HBV0), 2) protospacer present if one mismatch was allowed (HBV1), and 3) protospacer present if up to two mismatches were allowed (HBV2).

[1021] For every protospacer sequence, each of these three scores was generated. The scores represented the probability that for a given HBV genome, the protospacer would be present and active given the specific tolerances for mismatches in the 5′-end of the PAM. Multiple variants were found to be present on the same core protospacer-PAM sequence in the analysis. Therefore, the protospacer sequence list was further grouped based on the core protospacer-PAM sequence (NNNNNNNN-NGG). Finally, the protospacer sequence in each group with the highest perfect genome alignment score (homology) was chosen as the candidate gRNA for a given core protospacer-PAM sequence. The screening candidate spacers with more than 90% HBV genomic conservation and no mismatches (HBV0) are shown in Table E1. The screening candidate gRNA spacers with more than 90% HBV genomic conservation and 1-2 mismatches (HBV1) are shown in Table E1. The screening candidate gRNA spacers with 70-90% HBV genomic conservation and up to 2 mismatches (HBV2) are shown in Table E1. Each gRNA further comprised a scaffold sequence for SpCas9, comprising the sequence:

(SEQ ID NO: 587)
GUUUAAGAGCUAUGCUGGAAACAGCAUAGCAAGUUUAAAUAAGGCUAGUCCGUUAUCAA
CUUGAAAAAGUGGCACCGAGUCGGUGC.
5′-(protospacer) mN*mN*mN*rNrNrNrNrNrNrNrNrNrNrNrNrNrNrNrN rN
(scaffold)
rGrUrUrUrUrArGrArGrCrUrArGrArArArUrArGrCrArArGrUrUrArArArArUrArArGrGrCUrArGrUrCr
CrGrUrUrArUrCrArArCrUrUrGrArArArArArGrUrGrGrCrArCrCrGrArGrUrCrGrGrUrGrCrU*mU*mU
*mU-3′

[1022] Where m=2′ OMethyl RNA and *=Phosphorothioated bonds

TABLE E1
Candidate gRNAs with >90% HBV genomic conservation and no mismatches (HBV0)

| | Target | | | RNA |
|---|---|---|---|---|
| Target Site (protospacer) | SEQ | Sequence | | spacer |
| sequence | ID | name | gRNA spacer sequence | SEQ ID |
| CCCTATCTTATCAACACTTC | 1 | HBVg_1 | CCCUAUCUUAUCAACACUUC | 196 |
| GCAGAGGTGAAAAAGTTGCA | 2 | HBVg_2 | GCAGAGGUGAAAAAGUUGCA | 197 |
| TGGACTTCTCTCAATTTTCT | 3 | HBVg_3 | UGGACUUCUCUCAAUUUUCU | 198 |
| ACCCCGCCTGTAACACGAGC | 4 | HBVg_4 | ACCCCGCCUGUAACACGAGC | 199 |
| CCCGCCTGTAACACGAGCAG | 5 | HBVg_5 | CCCGCCUGUAACACGAGCAG | 200 |
| CACCACGAGTCTAGACTCTG | 6 | HBVg_6 | CACCACGAGUCUAGACUCUG | 201 |
| GAGGTGAAGCGAAGTGCACA | 7 | HBVg_7 | GAGGUGAAGCGAAGUGCACA | 202 |
| CCGGAAGTGTTGATAAGATA | 8 | HBVg_8 | CCGGAAGUGUUGAUAAGAUA | 203 |
| AGAAGATGAGGCATAGCAGC | 9 | HBVg_9 | AGAAGAUGAGGCAUAGCAGC | 204 |
| TCCGCAGTATGGATCGGCAG | 10 | HBVg_10 | UCCGCAGUAUGGAUCGGCAG | 205 |
| GGACTTCTCTCAATTTTCTA | 11 | HBVg_11 | GGACUUCUCUCAAUUUUCUA | 206 |
| CCACCCAAGGCACAGCTTGG | 12 | HBVg_12 | CCACCCAAGGCACAGCUUGG | 207 |
| AGAGAGGTGCGCCCCGTGGT | 13 | HBVg_13 | AGAGAGGUGCGCCCCGUGGU | 208 |
| GATTGAGATCTTCTGCGACG | 14 | HBVg_14 | GAUUGAGAUCUUCUGCGACG | 209 |
| CAAGCCTCCAAGCTGTGCCT | 15 | HBVg_15 | CAAGCCUCCAAGCUGUGCCU | 210 |
| GGCGAGGGAGTTCTTCTTCT | 16 | HBVg_16 | GGCGAGGGAGUUCUUCUUCU | 211 |
| TCCGGAAGTGTTGATAAGAT | 17 | HBVg_17 | UCCGGAAGUGUUGAUAAGAU | 212 |
| AAGCCACCCAAGGCACAGCT | 18 | HBVg_18 | AAGCCACCCAAGGCACAGCU | 213 |
| CCTCCAAGCTGTGCCTTGGG | 19 | HBVg_19 | CCUCCAAGCUGUGCCUUGGG | 214 |
| GTAAAGAGAGGTGCGCCCCG | 20 | HBVg_20 | GUAAAGAGAGGUGCGCCCCG | 215 |
| GGCAGATGAGAAGGCACAG | 21 | HBVg_21 | GGCAGAUGAGAAGGCACAGA | 216 |
| A | | | | |
| AGGAGTTCCGCAGTATGGAT | 22 | HBVg_22 | AGGAGUUCCGCAGUAUGGAU | 217 |
| GCTGTGCCTTGGGTGGCTTT | 23 | HBVg_23 | GCUGUGCCUUGGGUGGCUUU | 218 |
| ACCCCTGCTCGTGTTACAGG | 24 | HBVg_24 | ACCCCUGCUCGUGUUACAGG | 219 |
| CGGAAGTGTTGATAAGATAG | 25 | HBVg_25 | CGGAAGUGUUGAUAAGAUAG | 220 |
| CCTGCTGGTGGCTCCAGTTC | 26 | HBVg_26 | CCUGCUGGUGGCUCCAGUUC | 221 |
| CGAGGGAGTTCTTCTTCTAG | 27 | HBVg_27 | CGAGGGAGUUCUUCUUCUAG | 222 |
| GGGGCGCACCTCTCTTTACG | 28 | HBVg_28 | GGGGCGCACCUCUCUUUACG | 223 |
| AGCTTGGAGGCTTGAACAGT | 29 | HBVg_29 | AGCUUGGAGGCUUGAACAGU | 224 |
| AAGCCTCCAAGCTGTGCCTT | 30 | HBVg_30 | AAGCCUCCAAGCUGUGCCUU | 225 |
| CCCCTGCTCGTGTTACAGGC | 31 | HBVg_31 | CCCCUGCUCGUGUUACAGGC | 226 |
| GCGAGGGAGTTCTTCTTCTA | 32 | HBVg_32 | GCGAGGGAGUUCUUCUUCUA | 227 |
| TACTAGTGCCATTTGTTCAG | 33 | HBVg_33 | UACUAGUGCCAUUUGUUCAG | 228 |
| GACTTCTCTCAATTTTCTAG | 34 | HBVg_34 | GACUUCUCUCAAUUUUCUAG | 229 |

TABLE E2
Candidate gRNAs with >90% HBV genomic conservation and 1-2 mismatches (HBV1)

| | Target | | | RNA |
|---|---|---|---|---|
| Target Site (protospacer) | SEQ | Target | | spacer |
| sequence | ID | sequence | gRNA spacer sequence | SEQ ID |
| ATTGACCCGTATAAAGAATT | 35 | HBVg_35 | AUUGACCCGUAUAAAGAAU | 230 |
| | | | U | |
| ACCCAAAGACAAAAGAAAAT | 36 | HBVg_36 | ACCCAAAGACAAAAGAAAA | 231 |
| | | | U | |
| GTCCTCTTATGTAAGACCTT | 37 | HBVg_37 | GUCCUCUUAUGUAAGACCU | 232 |
| | | | U | |
| TGATCGGGAAAGAATCCCAG | 38 | HBVg_38 | UGAUCGGGAAAGAAUCCCA | 233 |
| | | | G | |
| TTTGCTGACGCAACCCCCAC | 39 | HBVg_39 | UUUGCUGACGCAACCCCCA | 234 |
| | | | C | |
| ATGAATCTAGCCACCTGGGT | 40 | HBVg_40 | AUGAAUCUAGCCACCUGGG | 235 |
| | | | U | |
| GGTCTCCATGCGACGTGCAG | 41 | HBVg_41 | GGUCUCCAUGCGACGUGCA | 236 |
| | | | G | |
| GGACTGAGGCCCACTCCCAT | 42 | HBVg_42 | GGACUGAGGCCCACUCCCA | 237 |
| | | | U | |
| CACAGAGTCTAGACTCGTGG | 43 | HBVg_43 | CACAGAGUCUAGACUCGUG | 238 |
| | | | G | |
| GAAGAACCAACAAGAAGAT | 44 | HBVg_44 | GAAGAACCAACAAGAAGAU | 239 |
| G | | | G | |
| ACACGGTCCGGCAGATGAGA | 45 | HBVg_45 | ACACGGUCCGGCAGAUGAG | 240 |
| | | | A | |
| GACATGAACATGAGATGATT | 46 | HBVg_46 | GACAUGAACAUGAGAUGAU | 241 |
| | | | U | |
| GCAGCACAGCCTAGCAGCCA | 47 | HBVg_47 | GCAGCACAGCCUAGCAGCC | 242 |
| | | | A | |
| TCCTGGAATTAGAGGACAAA | 48 | HBVg_48 | UCCUGGAAUUAGAGGACAA | 243 |
| | | | A | |
| GTCTTACATAAGAGGACTCT | 49 | HBVg_49 | GUCUUACAUAAGAGGACUC | 244 |
| | | | U | |
| TTGTGGGTCACCATATTCTT | 50 | HBVg_50 | UUGUGGGUCACCAUAUUCU | 245 |
| | | | U | |
| CGCAAAATACCTATGGGAGT | 51 | HBVg_51 | CGCAAAAUACCUAUGGGAG | 246 |
| | | | U | |
| GGGTTGCGTCAGCAAACACT | 52 | HBVg_52 | GGGUUGCGUCAGCAAACAC | 247 |
| | | | U | |
| AGCTCTTGTTCCCAAGAATA | 53 | HBVg_53 | AGCUCUUGUUCCCAAGAAU | 248 |
| | | | A | |
| TGACATACTTTCCAATCAAT | 54 | HBVg_54 | UGACAUACUUUCCAAUCAA | 249 |
| | | | U | |
| CAGATGAGAAGGCACAGACG | 55 | HBVg_55 | CAGAUGAGAAGGCACAGAC | 250 |
| | | | G | |
| CCCCGCCTGTAACACGAGCA | 56 | HBVg_56 | CCCCGCCUGUAACACGAGC | 251 |
| | | | A | |
| GGGTGGAGCCCTCAGGCTCA | 57 | HBVg_57 | GGGUGGAGCCCUCAGGCUC | 252 |
| | | | A | |
| ATTCCTTGGACTCATAAGGT | 58 | HBVg_58 | AUUCCUUGGACUCAUAAGG | 253 |
| | | | U | |
| TTTGTGGGTCACCATATTCT | 59 | HBVg_59 | UUUGUGGGUCACCAUAUUC | 254 |
| | | | U | |
| GTGAAAAAGTTGCATGGTGC | 60 | HBVg_60 | GUGAAAAAGUUGCAUGGUG | 255 |
| | | | C | |
| CCTGAACTGGAGCCACCAGC | 61 | HBVg_61 | CCUGAACUGGAGCCACCAG | 256 |
| | | | C | |
| TCCTCTGCCGATCCATACTG | 62 | HBVg_62 | UCCUCUGCCGAUCCAUACU | 257 |
| | | | G | |
| CGGCTAGGAGTTCCGCAGTA | 63 | HBVg_63 | CGGCUAGGAGUUCCGCAGU | 258 |
| | | | A | |
| AATGTCAACGACCGACCTTG | 64 | HBVg_64 | AAUGUCAACGACCGACCUU | 259 |
| | | | G | |
| GACCTTCGTCTGCGAGGCGA | 65 | HBVg_65 | GACCUUCGUCUGCGAGGCG | 260 |
| | | | A | |
| GTTGCCGGGCAACGGGGTAA | 66 | HBVg_66 | GUUGCCGGGCAACGGGGUA | 261 |
| | | | A | |
| GATTGAGACCTTCGTCTGCG | 67 | HBVg_67 | GAUUGAGACCUUCGUCUGC | 262 |
| | | | G | |
| AGGACCCCTGCTCGTGTTAC | 68 | HBVg_68 | AGGACCCCUGCUCGUGUUA | 263 |
| | | | C | |
| TTTGAAGTATGCCTCAAGGT | 69 | HBVg_69 | UUUGAAGUAUGCCUCAAGG | 264 |
| | | | U | |
| CCGCTTGTTTTGCTCGCAGC | 70 | HBVg_70 | CCGCUUGUUUUGCUCGCAG | 265 |
| | | | C | |
| TGCTAGGCTGTGCTGCCAAC | 71 | HBVg_71 | UGCUAGGCUGUGCUGCCAA | 266 |
| | | | C | |
| TGCCGATTGGTGGAGGCAGG | 72 | HBVg_72 | UGCCGAUUGGUGGAGGCAG | 267 |
| | | | G | |
| TCTTTGTACTAGGAGGCTGT | 73 | HBVg_73 | UCUUUGUACUAGGAGGCUG | 268 |
| | | | U | |
| CGTCCCGCGCAGGATCCAGT | 74 | HBVg_74 | CGUCCCGCGCAGGAUCCAG | 269 |
| | | | U | |
| AAAGCCCAAGATGATGGGAT | 75 | HBVg_75 | AAAGCCCAAGAUGAUGGGA | 270 |
| | | | U | |
| GCAGATGAGAAGGCACAGAC | 76 | HBVg_76 | GCAGAUGAGAAGGCACAGA | 271 |
| | | | C | |
| CGATTGGTGGAGGCAGGAGG | 77 | HBVg_77 | CGAUUGGUGGAGGCAGGAG | 272 |
| | | | G | |
| AGGAGGCTGTAGGCATAAAT | 78 | HBVg_78 | AGGAGGCUGUAGGCAUAAA | 273 |
| | | | U | |
| CCATGCCCCAAAGCCACCCA | 79 | HBVg_79 | CCAUGCCCCAAAGCCACCC | 274 |
| | | | A | |
| AGGTTGGGGACTGCGAATTT | 80 | HBVg_80 | AGGUUGGGGACUGCGAAUU | 275 |
| | | | U | |
| AGACCTTCGTCTGCGAGGCG | 81 | HBVg_81 | AGACCUUCGUCUGCGAGGC | 276 |
| | | | G | |
| CCTGGAATTAGAGGACAAAC | 82 | HBVg_82 | CCUGGAAUUAGAGGACAAA | 277 |
| | | | C | |
| TTTCAGTTATATGGATGATG | 83 | HBVg_83 | UUUCAGUUAUAUGGAUGAU | 278 |
| | | | G | |
| GTAACACGAGCAGGGGTCCT | 84 | HBVg_84 | GUAACACGAGCAGGGGUCC | 279 |
| | | | U | |
| CATCTTCTTGTTGGTTCTTC | 85 | HBVg_85 | CAUCUUCUUGUUGGUUCUU | 280 |
| | | | C | |
| CGGGGAGACCGCGTAAAGAG | 86 | HBVg_86 | CGGGGAGACCGCGUAAAGA | 281 |
| | | | G | |
| CTAGACTCTGTGGTATTGTG | 87 | HBVg_87 | CUAGACUCUGUGGUAUUGU | 282 |
| | | | G | |
| CCCTGCTCGTGTTACAGGCG | 88 | HBVg_88 | CCCUGCUCGUGUUACAGGC | 283 |
| | | | G | |
| TACCACAGAGTCTAGACTCG | 89 | HBVg_89 | UACCACAGAGUCUAGACUC | 284 |
| | | | G | |
| TCGCAAAATACCTATGGGAG | 90 | HBVg_90 | UCGCAAAAUACCUAUGGGA | 285 |
| | | | G | |
| GTCTGTGCCTTCTCATCTGC | 91 | HBVg_91 | GUCUGUGCCUUCUCAUCUG | 286 |
| | | | C | |
| ACACGTAGCGCCTCATTTTG | 92 | HBVg_92 | ACACGUAGCGCCUCAUUUU | 287 |
| | | | G | |
| TTGGGGTTGAGGTCCCAATC | 93 | HBVg_93 | UUGGGGUUGAGGUCCCAAU | 288 |
| | | | C | |
| CCCCGAGACGGGTCGTCCGC | 94 | HBVg_94 | CCCCGAGACGGGUCGUCCG | 289 |
| | | | C | |
| CCTACGAACCACTGAACAAA | 95 | HBVg_95 | CCUACGAACCACUGAACAA | 290 |
| | | | A | |
| TTACATACTCTGTGGAAGGC | 96 | HBVg_96 | UUACAUACUCUGUGGAAGG | 291 |
| | | | C | |
| ACCTCCTTTCCATGGCTGCT | 97 | HBVg_97 | ACCUCCUUUCCAUGGCUGC | 292 |
| | | | U | |
| GTTATCGCTGGATGTGTCTG | 98 | HBVg_98 | GUUAUCGCUGGAUGUGUCU | 293 |
| | | | G | |
| AACATGAGATGATTAGGCAG | 99 | HBVg_99 | AACAUGAGAUGAUUAGGCA | 294 |
| | | | G | |
| ACTTCTCTCAATTTTCTAGG | 100 | HBVg_100 | ACUUCUCUCAAUUUUCUAG | 295 |
| | | | G | |

TABLE E3
Candidate gRNAs with 70-90% HBV genomic conservation and up to 2 mismatches (HBV2)

| | | | | RNA |
|---|---|---|---|---|
| | Target | | | spacer |
| Target Site (protospacer) | SEQ | Sequence | | SEQ |
| sequence | ID | name | gRNA spacer sequence | ID |
| CACTTTCTCGCCAACTTACA | 101 | HBVg_101 | CACUUUCUCGCCAACUUA | 296 |
| | | | CA | |
| CATAAGGTGGGAAACTTTAC | 102 | HBVg_102 | CAUAAGGUGGGAAACUUU | 297 |
| | | | AC | |
| CCAAACCTCGAAAAGGCATG | 103 | HBVg_103 | CCAAACCUCGAAAAGGCA | 298 |
| | | | UG | |
| ATAGAAGGAAAGAAGTCAG | 104 | HBVg_104 | AUAGAAGGAAAGAAGUCA | 299 |
| A | | | GA | |
| GCTGCTCCTTTTACACAATG | 105 | HBVg_105 | GCUGCUCCUUUUACACAA | 300 |
| | | | UG | |
| GAAGCGAAGTGCACACGGTC | 106 | HBVg_106 | GAAGCGAAGUGCACACGG | 301 |
| | | | UC | |
| GGATCATCAACCACCAGCAC | 107 | HBVg_107 | GGAUCAUCAACCACCAGC | 302 |
| | | | AC | |
| GAGCCAAGAGAAACGGACTG | 108 | HBVg_108 | GAGCCAAGAGAAACGGAC | 303 |
| | | | UG | |
| CTTCACCTCTGCACGTCGCA | 109 | HBVg_109 | CUUCACCUCUGCACGUCGC | 304 |
| | | | A | |
| ACAATGTTCCGGAGACTCTA | 110 | HBVg_110 | ACAAUGUUCCGGAGACUC | 305 |
| | | | UA | |
| TCCGCGGGATTCAGCGCCGA | 111 | HBVg_111 | UCCGCGGGAUUCAGCGCC | 306 |
| | | | GA | |
| TTAATGAGTGGGAGGAGTTG | 112 | HBVg_112 | UUAAUGAGUGGGAGGAGU | 307 |
| | | | UG | |
| CCAACTCAAACAATCCAGAT | 113 | HBVg_113 | CCAACUCAAACAAUCCAG | 308 |
| | | | AU | |
| GCTGCCAACTGGATCCTGCG | 114 | HBVg_114 | GCUGCCAACUGGAUCCUG | 309 |
| | | | CG | |
| AGTCTTTGAAGTATGCCTCA | 115 | HBVg_115 | AGUCUUUGAAGUAUGCCU | 310 |
| | | | CA | |
| TCCTGACTGCCGATTGGTGG | 116 | HBVg_116 | UCCUGACUGCCGAUUGGU | 311 |
| | | | GG | |
| TCTTGTCCTCCAATTTGTCC | 117 | HBVg_117 | UCUUGUCCUCCAAUUUGU | 312 |
| | | | CC | |
| CGATAACCAGGACAAATTGG | 118 | HBVg_118 | CGAUAACCAGGACAAAUU | 313 |
| | | | GG | |
| ATTTGGAAGATCCAGCATCC | 119 | HBVg_119 | AUUUGGAAGAUCCAGCAU | 314 |
| | | | CC | |
| CTGTTTGGCTTTCAGTTATA | 120 | HBVg_120 | CUGUUUGGCUUUCAGUUA | 315 |
| | | | UA | |
| CTCCTCCTGCCTCCACCAAT | 121 | HBVg_121 | CUCCUCCUGCCUCCACCAA | 316 |
| | | | U | |
| GTCATCCTCAGGCCATGCAG | 122 | HBVg_122 | GUCAUCCUCAGGCCAUGC | 317 |
| | | | AG | |
| CTGCCGTTCCGGCCGACCAC | 123 | HBVg_123 | CUGCCGUUCCGGCCGACCA | 318 |
| | | | C | |
| CCTTCCTGACTGCCGATTGG | 124 | HBVg_124 | CCUUCCUGACUGCCGAUU | 319 |
| | | | GG | |
| ACCTGCACGACTCCTGCTCA | 125 | HBVg_125 | ACCUGCACGACUCCUGCUC | 320 |
| | | | A | |
| GGCCTGTATTTTCCTGCTGG | 126 | HBVg_126 | GGCCUGUAUUUUCCUGCU | 321 |
| | | | GG | |
| AACATAGAGGTTCCTTGAGC | 127 | HBVg_127 | AACAUAGAGGUUCCUUGA | 322 |
| | | | GC | |
| TGCCGTTCCGGCCGACCACG | 128 | HBVg_128 | UGCCGUUCCGGCCGACCAC | 323 |
| | | | G | |
| ATAGGCCATCAGCGCATGCG | 129 | HBVg_129 | AUAGGCCAUCAGCGCAUG | 324 |
| | | | CG | |
| GCCTCCACCAATCGGCAGTC | 130 | HBVg_130 | GCCUCCACCAAUCGGCAG | 325 |
| | | | UC | |
| GTCCTTTGTTTACGTCCCGT | 131 | HBVg_131 | GUCCUUUGUUUACGUCCC | 326 |
| | | | GU | |
| TGGGAACAAGAGCTACAGCA | 132 | HBVg_132 | UGGGAACAAGAGCUACAG | 327 |
| | | | CA | |
| CTGTAAACAGGCCTATTGAT | 133 | HBVg_133 | CUGUAAACAGGCCUAUUG | 328 |
| | | | AU | |
| GTCGCAGAAGATCTCAATCT | 134 | HBVg_134 | GUCGCAGAAGAUCUCAAU | 329 |
| | | | CU | |
| CTGCCTTCCTGACTGCCGAT | 135 | HBVg_135 | CUGCCUUCCUGACUGCCG | 330 |
| | | | AU | |
| ACTACTAATTCCCTGGATGC | 136 | HBVg_136 | ACUACUAAUUCCCUGGAU | 331 |
| | | | GC | |
| CACATTTCTTGCCTTACTTT | 137 | HBVg_137 | CACAUUUCUUGCCUUACU | 332 |
| | | | UU | |
| GGATGACTGTCTCTTAGAGG | 138 | HBVg_138 | GGAUGACUGUCUCUUAGA | 333 |
| | | | GG | |
| GCTATGCCTCATCTTCTTGT | 139 | HBVg_139 | GCUAUGCCUCAUCUUCUU | 334 |
| | | | GU | |
| CCCGTCGGCGCTGAATCCCG | 140 | HBVg_140 | CCCGUCGGCGCUGAAUCCC | 335 |
| | | | G | |
| TAGTATTCCTTGGACTCATA | 141 | HBVg_141 | UAGUAUUCCUUGGACUCA | 336 |
| | | | UA | |
| AGGTAGGAGCGGGAGCATTC | 142 | HBVg_142 | AGGUAGGAGCGGGAGCAU | 337 |
| | | | UC | |
| TCTTTTGGGGTGGAGCCCTC | 143 | HBVg_143 | UCUUUUGGGGUGGAGCCC | 338 |
| | | | UC | |
| TCAGTATGCCCTGAGCCTGA | 144 | HBVg_144 | UCAGUAUGCCCUGAGCCU | 339 |
| | | | GA | |
| TTTAATGAGTGGGAGGAGTT | 145 | HBVg_145 | UUUAAUGAGUGGGAGGAG | 340 |
| | | | UU | |
| CTCCCTCGCCTCGCAGACGA | 146 | HBVg_146 | CUCCCUCGCCUCGCAGACG | 341 |
| | | | A | |
| GATAAGATAGGGGCATTTGG | 147 | HBVg_147 | GAUAAGAUAGGGGCAUUU | 342 |
| | | | GG | |
| CCGCGGGATTCAGCGCCGAC | 148 | HBVg_148 | CCGCGGGAUUCAGCGCCG | 343 |
| | | | AC | |
| CAGCGATAACCAGGACAAAT | 149 | HBVg_149 | CAGCGAUAACCAGGACAA | 344 |
| | | | AU | |
| CAGGTAGGAGTGGGAGCATT | 150 | HBVg_150 | CAGGUAGGAGUGGGAGCA | 345 |
| | | | UU | |
| GTTTAATGAGTGGGAGGAGT | 151 | HBVg_151 | GUUUAAUGAGUGGGAGGA | 346 |
| | | | GU | |
| TGGTGAGTGATTGGAGGTTG | 152 | HBVg_152 | UGGUGAGUGAUUGGAGGU | 347 |
| | | | UG | |
| TAATGAGTGGGAGGAGTTGG | 153 | HBVg_153 | UAAUGAGUGGGAGGAGUU | 348 |
| | | | GG | |
| ACTACATGTTCTGGATAATA | 154 | HBVg_154 | ACUACAUGUUCUGGAUAA | 349 |
| | | | UA | |
| GGCATAGCAGCAGGATGAAG | 155 | HBVg_155 | GGCAUAGCAGCAGGAUGA | 350 |
| | | | AG | |
| GTTGATAAGATAGGGGCATT | 156 | HBVg_156 | GUUGAUAAGAUAGGGGCA | 351 |
| | | | UU | |
| TCAACGAATTGTGGGTCTTT | 157 | HBVg_157 | UCAACGAAUUGUGGGUCU | 352 |
| | | | UU | |
| TATGGATGATGTGGTATTGG | 158 | HBVg_158 | UAUGGAUGAUGUGGUAUU | 353 |
| | | | GG | |
| CAACGAATTGTGGGTCTTTT | 159 | HBVg_159 | CAACGAAUUGUGGGUCUU | 354 |
| | | | UU | |
| CATTTGTTCAGTGGTTCGTA | 160 | HBVg_160 | CAUUUGUUCAGUGGUUCG | 355 |
| | | | UA | |
| CGTCTAACAACAGTAGTTTC | 161 | HBVg_161 | CGUCUAACAACAGUAGUU | 356 |
| | | | UC | |
| TGCCTGAGTGCTGTATGGTG | 162 | HBVg_162 | UGCCUGAGUGCUGUAUGG | 357 |
| | | | UG | |
| GCCCCGAGACGGGTCGTCCG | 163 | HBVg_163 | GCCCCGAGACGGGUCGUC | 358 |
| | | | CG | |
| GACTGCCGATTGGTGGAGGC | 164 | HBVg_164 | GACUGCCGAUUGGUGGAG | 359 |
| | | | GC | |
| TATATGGATGATGTGGTATT | 165 | HBVg_165 | UAUAUGGAUGAUGUGGUA | 360 |
| | | | UU | |
| CTTGAGTATTTGGTGTCTTT | 166 | HBVg_166 | CUUGAGUAUUUGGUGUCU | 361 |
| | | | UU | |
| GATCTGGTGGGCGTTCACGG | 167 | HBVg_167 | GAUCUGGUGGGCGUUCAC | 362 |
| | | | GG | |
| AGACTGGGAGGAGTTGGGGG | 168 | HBVg_168 | AGACUGGGAGGAGUUGGG | 363 |
| | | | GG | |
| AGTCCTCTTATGTAAGACCT | 169 | HBVg_169 | AGUCCUCUUAUGUAAGAC | 364 |
| | | | CU | |
| CTCAAGATGTTGTACAGACT | 170 | HBVg_170 | CUCAAGAUGUUGUACAGA | 365 |
| | | | CU | |
| GGGAACAAGAGCTACAGCAT | 171 | HBVg_171 | GGGAACAAGAGCUACAGC | 366 |
| | | | AU | |
| TCGCAGAAGATCTCAATCTC | 172 | HBVg_172 | UCGCAGAAGAUCUCAAUC | 367 |
| | | | UC | |
| GGGGTGGAGCCCTCAGGCTC | 173 | HBVg_173 | GGGGUGGAGCCCUCAGGC | 368 |
| | | | UC | |
| TATTCCTTGGACTCATAAGG | 174 | HBVg 174 | UAUUCCUUGGACUCAUAA | 369 |
| | | | GG | |
| TCTAAGAGACAGTCATCCTC | 175 | HBVg_175 | UCUAAGAGACAGUCAUCC | 370 |
| | | | UC | |
| CAACTCAAACAATCCAGATT | 176 | HBVg_176 | CAACUCAAACAAUCCAGA | 371 |
| | | | UU | |
| AAACAAAGGACGTCCCGCGC | 177 | HBVg_177 | AAACAAAGGACGUCCCGC | 372 |
| | | | GC | |
| CTGCCAACTGGATCCTGCGC | 178 | HBVg_178 | CUGCCAACUGGAUCCUGC | 373 |
| | | | GC | |
| GAAGCTCCAAATTCTTTATA | 179 | HBVg 179 | GAAGCUCCAAAUUCUUUA | 374 |
| | | | UA | |
| GTCAGTATGCCCTGAGCCTG | 180 | HBVg_180 | GUCAGUAUGCCCUGAGCC | 375 |
| | | | UG | |
| TTTCCCACCTTATGAGTCCA | 181 | HBVg_181 | UUUCCCACCUUAUGAGUC | 376 |
| | | | CA | |
| ACAAGAGGTTGGTGAGTGAT | 182 | HBVg_182 | ACAAGAGGUUGGUGAGUG | 377 |
| | | | AU | |
| GAAAGCCCAAGATGATGGGA | 183 | HBVg 183 | GAAAGCCCAAGAUGAUGG | 378 |
| | | | GA | |
| AGGTTCCACGCATGCGCTGA | 184 | HBVg_184 | AGGUUCCACGCAUGCGCU | 379 |
| | | | GA | |
| TTGGTGAGTGATTGGAGGTT | 185 | HBVg_185 | UUGGUGAGUGAUUGGAGG | 380 |
| | | | UU | |
| AGAGCTACAGCATGGGAGGT | 186 | HBVg_186 | AGAGCUACAGCAUGGGAG | 381 |
| | | | GU | |
| ATATGGATGATGTGGTATTG | 187 | HBVg_187 | AUAUGGAUGAUGUGGUAU | 382 |
| | | | UG | |
| CCATTTGTTCAGTGGTTCGT | 188 | HBVg_188 | CCAUUUGUUCAGUGGUUC | 383 |
| | | | GU | |
| TTATATGGATGATGTGGTAT | 189 | HBVg_189 | UUAUAUGGAUGAUGUGGU | 384 |
| | | | AU | |
| GGAGTGGGAGCATTCGGGCC | 190 | HBVg_190 | GGAGUGGGAGCAUUCGGG | 385 |
| | | | CC | |
| ATTTGGTGTCTTTTGGAGTG | 191 | HBVg_191 | AUUUGGUGUCUUUUGGAG | 386 |
| | | | UG | |
| CACAGAAAGGCCTTGTAAGT | 192 | HBVg_192 | CACAGAAAGGCCUUGUAA | 387 |
| | | | GU | |
| ACCAATTTTCTTTTGTCTTT | 193 | HBVg_193 | ACCAAUUUUCUUUUGUCU | 388 |
| | | | UU | |
| AGGTTAATGGTCTTTGTACT | 194 | HBVg_194 | AGGUUAAUGGUCUUUGUA | 389 |
| | | | CU | |
| TACCAATTTTCTTTTGTCTT | 195 | HBVg_195 | UACCAAUUUUCUUUUGUC | 390 |
| | | | UU | |

### Example 2: Identification of gRNAs for Targeted Transcriptional Repression of Genes and Regulatory Elements Thereof Associated with Viral Replication and Transcription

[1023] gRNAs were identified that facilitate transcriptional repression of targeted genes within the HBV genome present in either integrated HBV DNA and in covalently closed circular DNA (cccDNA) or relaxed circular DNA (rcDNA), as part of a DNA-targeting system comprising the gRNA and a dCas9-effector fusion protein. FIGS. 1 and 4 depict the median targeting positions of each gRNAs across the HBV genome.

### I) Transient Arrayed Screening for Modulators of the Intergrated HBV Genome

[1024] A. Short Interval (5-Day) Screen Using dCas9-KRAB

[1025] Guide RNAs targeting genes and regulatory elements thereof associated with HBV transcription, including those listed in Tables E1-E3 and Table 6, were transfected into Hep3B cells expressing HBV from integrated sequences only (without cccDNA), together with an mRNA encoding a dSpCas9-KRAB fusion protein (SEQ ID NO:594) for transcriptional repression of gRNA-targeted genes.

[1026] Other cell lines such as immortalized HBV infected human hepatocyte cell lines (Hep3B, PLC/PRF/5), engineered hepatocyte cell lines that contain a transgene copy of the HBV genome (HepG2.2.15, HepAD38), or engineered immortalized hepatocyte lines that overexpress the cognate surface receptor required for HBV entry (HepG2.NTCP) may be considered, together with a dSpCas9-effector fusion protein for simultaneous transcriptional repression of one or more gRNA-targeted genes. Additionally, to increase repression of HBV replication and transcription a combination of multiple exemplary gRNAs from Tables E1-E3 and Table 6, either targeting the same or different HBV viral genes may be delivered in a multiplexed approach.

[1027] Transfected cells were assessed on day 5 for transcriptional repression of the targeted HBV transcripts by qRT-PCR measurement of either HBsAg transcript or total HBV RNA transcript levels (FIGS. 1 and 3). Transfected cells may also be assessed for transcriptional repression by ELISA for reduction in Hepatitis B Surface Antigen (HBsAg) levels from integrated and cccDNA as well as Hepatitis B Virus core related-Antigen Protein (HBcrAg) levels from cccDNA only. gRNAs mediating repression resulting in reduction of HBsAg by 90% and HBeAg by 50% may be identified for further analysis.

[1028] FIG. 1 depicts the log fold change in HBV RNA for each gRNA in Hep3B cells following delivery alongside dCas9-KRAB. The x-axis depicts the median targeting positions of each gRNAs across the HBV genome. As shown in FIG. 1, sites targeted by 94 out of 192 gRNAs (“Any repression”, depicted using arrow) showed repression of total HBV RNA. The “hit” gRNAs identified targeted the polymerase, S, short X, or the pre-core genes. Sites targeted by 48 out of the 192 gRNAs (“>75% repression”, depicted using arrow) showed more than 75% repression of total HBV RNA. Guide RNAs set forth in SEQ ID NOS: 565 (HBVg_175), 528 (HBVg_138), 582 (HBVg_192), 542 (HBVg_152), 508 (HBVg_118), 515 (HBVg_125), 575 (HBVg_185), 453 (HBVg_63), 506 (HBVg_116), 514 (HBVg_124), 395 (HBVg_5), 472 (HBVg_82), 451 (HBVg_61), 488 (HBVg_98), 540 (HBVg_150), 533 (HBVg_143), 572 (HBVg_182), 566 (HBVg_176), 489 (HBVg_99), 469 (HBVg_79), 408 (HBVg_18), 465 (HBVg_75), 402 (HBVg_12), 474 (HBVg_84), 525 (HBVg_135), 416 (HBVg_26), 369 (HBVg_6), 554 (HBVg_164), 419 (HBVg_29), 545 (HBVg_155), 446 (HBVg_56), 580 (HBVg_190), 555 (HBVg_165), 412 (HBVg_22), 428 (HBVg_38), 458 (HBVg_68), 548 (HBVg_158), 511 (HBVg_121), 432 (HBVg_42), 441 (HBVg_51), 433 (HBVg_43), 579 (HBVg_189), 479 (HBVg_89), 478 (HBVg_88), 520 (HBVg_130), 462 (HBVg_72), 523 (HBVg_133), and 503 (HBVg_113) mediated more than 75% repression of total HBV RNA. Furthermore, sites targeted by 10 out of the 192 gRNAs (“>90% repression”, depicted using arrow) showed more than 90% repression of total HBV RNA (up to 98.5%).

[1029] Specifically, more than 90% repression of total HBV RNA was observed with gRNAs targeting the M/S-HBs promoter, Enh1/X-promoter, Enh2/Basal core promoter, L-HBs promoter or the M/S-gene promoter regions. Guide RNAs set forth in SEQ ID NOs: 565, 528, 582, 542, 508, 515, 575, 453, 506, 514, 425, or 472 mediated more than 90% repression of total HBV RNA.

[1030] The gRNAs (SEQ ID NOS: 528 (HBVg_138), 582 (HBVg_192), 565 (HBVg_175), 453 (HBVg_63) with the highest transcriptional repression of total HBV RNA targeted the L-HBs promoter and Enh1/X-promoter regions (HBV median positions: 3197 bp (HBVg_138), 1124 bp (HBVg_192), 3179 bp (HBVg_175), and 1288 bp (HBVg_63) of the HBV genome corresponding to positions with reference to the Hepatitis B Virus genome (Hepatitis B virus subtype ayw, complete genome, GenBank: U95551.1), SEQ ID NO: 650) (FIG. 3A). The median position comprises the average position across all HBV genotypes. For instance, the median position comprises the average position of HBV genomes comprising sequences set forth in SEQ ID NOS: 650, 678, and 679. The gRNAs (SEQ ID NOS: 528 (HBVg_138), 582 (HBVg_192), 453 (HBVg_63), and 489 (HBVg_99) with the highest transcriptional repression of HBsAg RNA targeted the Enh1/X-promoter, Enh2/basal core promoter, and L-HBs promoter regions (HBV median positions: 3197 bp (HBVg_138), 1124 bp (HBVg_192), 1288 bp (HBVg_63), 1850 bp (HBVg_99), and 1904 bp (HBVg_79), of the HBV genome corresponding to positions with reference to the Hepatitis B Virus genome (Hepatitis B virus subtype ayw, complete genome, GenBank: U95551.1), SEQ ID NO: 650) (FIG. 3B).

### B. Long Interval Therapeutically Relevant Screen Using DNMT3A/L-dSpCas9-KRAB

[1031] Guide RNAs targeting genes and regulatory elements thereof associated with HBV transcription, including those listed in Tables E1-3 and Table 6, were transfected into Hep3B cells expressing HBV from integrated sequences only (without cccDNA), together with an mRNA encoding a DNMT3A/L-dSpCas9-KRAB fusion protein (SEQ ID NO: 644) for transcriptional repression of gRNA-targeted genes.

[1032] Other cell lines such as immortalized HBV infected human hepatocyte cell lines (Hep3B, PLC/PRF/5), engineered hepatocyte cell lines that contain a transgene copy of the HBV genome (HepG2.2.15, HepAD38), or engineered immortalized hepatocyte lines that overexpress the cognate surface receptor required for HBV entry (HepG2.NTCP) may be considered, together with an mRNA encoding the dSpCas9-effector fusion protein for simultaneous transcriptional repression of one or more gRNA-targeted genes. Additionally, to increase repression of HBV replication and transcription a combination of multiple exemplary gRNAs from Table E1 and Table 6, either targeting the same or different HBV viral genes may be delivered in a multiplexed approach.

[1033] Transfected cells were assessed on days 41 and 61 for transcriptional repression of the targeted HBV transcripts by qRT-PCR measurement of total HBV RNA transcript levels (FIGS. 4 and 5). Transfected cells may also be assessed for transcriptional repression by ELISA for reduction in Hepatitis B Surface Antigen (HBsAg) levels from integrated and cccDNA as well as Hepatitis B Virus core related-Antigen Protein (HBcrAg) levels from cccDNA only. gRNAs mediating repression resulting in reduction of total HBV RNA transcript levels by at least 80% were identified for further analysis.

[1034] FIG. 4 depicts the log fold change in HBV RNA for each gRNA on day 61. The x-axis depicts the median targeting positions of each gRNAs across the HBV genome. The gRNAs identified targeted the polymerase, S, short X, or the pre-core genes. Specifically, more than 80% repression of total HBV RNA was observed with gRNAs targeting the pre-S1 promoter, pre-S2 promoter, and the polymerase gene.

[1035] The gRNAs (HBVg_142; SEQ ID NO: 532, HBVg_138; SEQ ID NO: 528, HBVg_185: SEQ ID NO: 575, HBVg_26: SEQ ID NO: 416, and HBVg_152; SEQ ID NO: 542) with the highest transcriptional repression of total HBV RNA targeted the pre-S1 promoter, pre-S2 promoter, CpG island 1, and the polymerase genes (Median positions: 3016 bp (HBVg_142), 3197 bp (HBVg_138), 341 bp (HBVg_185), 55 bp (HBVg_26), and 340 bp (HBVg_152) of the HBV genome corresponding to positions with reference to the Hepatitis B Virus genome (Hepatitis B virus subtype ayw, complete genome, GenBank: U95551.1), SEQ ID NO: 650) (FIG. 5). Surprisingly, transcriptional repression of at least 80% persisted until 41- and 61-days post-transfection, indicating long lasting efficacy of the epigenetic editing, as the dCas9 fusion protein is no longer expressed by these late timepoints.

[1036] Transfected cells were also assessed for transcriptional repression of the targeted HBV transcripts at longer timepoints by qRT-PCR measurement of total HBV RNA transcript levels (FIGS. 6A-6B). Multiple gRNAs as set forth in SEQ ID NOs: 453 (HBVg_63), 575 (HBVg_185), 446 (HBVg_56), 412 (HBVg_22), and 416 (HBVg_26) showed therapeutically viable repression levels of integrated HBV RNA after 248 days and more than 120 cell doublings. Stable repression in total HBV RNA was achieved after a single dose of gRNA.

[1037] Transfected cells from day 222 of the study were re-transfected with the same gRNA or non-targeting gRNA and the mRNA encoding DNMT3A/L-dSpCas9-KRAB fusion protein (SEQ ID NO: 644) using lipofectamine MessengerMax. Total HBV RNA levels were examined four days after transfection to evaluate improvement in repression upon redosing. Guide RNAs HBVg_22 (SEQ ID NO: 412), HBVg26 (SEQ ID NO: 416), HBVg_185 (SEQ ID NO: 575), and HBVg_63 (SEQ ID NO: 453) showed significant repression after the first dose and showed further marked reductions in HBV RNA levels after redosing (FIG. 7). The effect was sustained as full repression for a given dose was reached. Near complete repression was achieved (95% bulk RNA) in almost all cells (˜96%) once delivery was corrected for. Non-targeting gRNAs did not significantly affect repression levels as compared to non-treated control cells. Further studies to evaluate redosing at lower baseline delivery levels may be performed. Delivery and re-dosing in primary human hepatocytes and mouse models may be optimized.

[1038] II) Transient Arrayed Screening for Modulators of Episomal cccDNA in a True Infection Model

[1039] HepG2.NTCP cells dosed with HBV at 100 GE/cell were treated with control or standard of care treatment (e.g., nucleoside analogs such as Entecavir (ETV)) three days post HBV infection. HepG2.NTCP cells enable a true infection model of HBV as the HBV infection is sustained due to the generation and presence of native cccDNA. Six days after HBV infection, gRNAs targeting genes and regulatory elements thereof associated with HBV transcription, including those listed in Tables E1-E3 and Table 6, were transfected via lipofection into the cells expressing HBV from cccDNA together with an mRNA encoding the DNMT3A/L-dSpCas9-KRAB fusion protein (SEQ ID NO: 644) for transcriptional repression of gRNA-targeted HBV genes.

[1040] Transfected cells were harvested and assessed on day 5 for transcriptional repression of the targeted HBV transcripts (either Total HBV RNA or 3.5 kB HBV RNAs). Measurements of 3.5 kb total HBV RNA transcript levels was performed via qRT-PCR, with one representative run shown (FIG. 8). Transfected cells may also be assessed for transcriptional repression by ELISA for reduction in Hepatitis B Surface Antigen (HBsAg) levels and Hepatitis B Virus core related-Antigen Protein (HBcrAg) levels from cccDNA. gRNAs were identified that mediated repression resulting in reduction of 3.5 kb total HBV RNA transcript levels by at least 80%.

[1041] FIG. 8 depicts the log fold change in 3.5 kb total HBV RNA for each gRNA from one replicate of the screen. The x-axis depicts the median targeting positions of each gRNA across the HBV genome. The gRNAs (HBVg_45: SEQ ID NO: 435, HBVg_22; SEQ ID NO: 412, HBVg_456: SEQ ID NO: 66, HBVg_6; SEQ ID NO: 396, HBVg_34: SEQ ID NO: 424, HBVg_182: SEQ ID NO: 572) with the highest transcriptional repression of 3.5 kb total HBV RNA targeted Enhancer 1/X promoter region and the Enhancer II regulatory element (HBV median position: 1580 bp (HBVg_45), (97.5%)), the polymerase gene and CpG island 2 (HBV median positions:1283 bp (HBVg_22) (93.0%) and 1162 bp (HBVg_66) (90.4%)), and the polymerase gene and CpG island 1 (HBV median positions: 261 bp (HBVg_6, and/or HBVg_34) (89.8%) and 349 bp (HBVg_182) (89.7%)).

[1042] A correlation plot of the cccDNA screen (rep #3) to another cccDNA screen (rep #2) showed infection-to-infection consistency (FIG. 9). gRNAs were identified that either repressed integrated HBV, cccDNA, or both integrated and cccDNA (FIG. 10). Finally, gRNAs were identified that achieved multiplexed HBV repression from a single gRNA. FIG. 11 lists sequences targeted by single gRNAs that achieved repression of multiple genes and regulatory elements (e.g., HBs/CpG Island 1, HBx/Enh1 enhancer/CpG Island 2). The repression was achieved within the integrated HBV DNA and cccDNA HBV genomes with high combined efficiencies. FIG. 12 lists sequences targeted by gRNAs (HBVg_22; SEQ ID NO: 412, HBVg_63; SEQ ID NO: 453, HBVg_185; SEQ ID NO: 575, HBVg_99: SEQ ID NO: 489), that achieve durable repression across multiple HBV transcripts (both integrated and cccDNA HBV depots). The repression is effective following a single transient delivery of mRNA/gRNA. These single gRNAs may be used in combination for multiplexed approaches.

[1043] Transfected cells were also harvested and assessed on day 14, a later timepoint, for transcriptional repression of the targeted HBV transcripts. Measurements of 3.5 kb total HBV RNA transcript levels was performed via qRT-PCR (FIG. 13). Transfected cells may also be assessed for transcriptional repression by ELISA for reduction in Hepatitis B Surface Antigen (HBsAg) levels and Hepatitis B Virus core related-Antigen Protein (HbcrAg) levels from cccDNA. FIG. 13 depicts the log fold change in 3.5 kb HBV RNA for each gRNA. The x-axis depicts the median targeting positions of each gRNA across the HBV genome. Multiple gRNAs (28/189) were identified that mediated repression of over 80% and up to 97.2% of the 3.5 kb HBV cccDNA. The gRNAs identified were HBVg_73 (SEQ ID NO: 463), HBVg_192 (SEQ ID NO: 582), HBVg_18 (SEQ ID NO: 408), HBVg_63 (SEQ ID NO: 453), HBVg_22 (SEQ ID NO: 412), HBVg_185 (SEQ ID NO: 575), HBVg_46 (SEQ ID NO: 436), HBVg_99 (SEQ ID NO: 489), HBVg_162 (SEQ ID NO: 552), HBVg_174 (SEQ ID NO: 568), HBVg_20 (SEQ ID NO: 410), HBVg_79 (SEQ ID NO: 469), HBVg_50 (SEQ ID NO: 440), HBVg_79 (SEQ ID NO: 469), HBVg_50 (440), HBVg_27 (SEQ ID NO: 417), HBVg_182 (SEQ ID NO: 572), and HBVg_12 (SEQ ID NO: 402).

[1044] FIG. 14 shows repression of the targeted HBV cccDNA transcripts by single gRNAs HBVg_73 (SEQ ID NO: 463), HBVg_192 (SEQ ID NO: 582), HBVg_18 (SEQ ID NO: 408), HBVg_63 (SEQ ID NO: 456), HBVg_22 (SEQ ID NO: 412), HBVg_185 (SEQ ID NO: 575), HBVg_46 (SEQ ID NO: 436), HBVg_99 (SEQ ID NO: 489), HBVg_162 (SEQ ID NO: 552), HBVg_174 (SEQ ID NO: 564), HBVg_5 (SEQ ID NO: 410), HBVg_79 (SEQ ID NO: 469), HBVg_50 (SEQ ID NO: 440), HBVg_27 (SEQ ID NO: 417), HBVg_66 (SEQ ID NO: 456), and HBVg_182 (SEQ ID NO: 572). The sites targeted by the gRNAs were also 92% conserved across HBV genotypes. Guide RNAs HBVg_73 (SEQ ID NO: 463) (93%), HBVg_192 (SEQ ID NO: 582) (91.9%), and HBVg_18 (SEQ ID NO: 408) (91.8%) mediated the highest repression.

### Example 3: Strong Repression of cccDNA Achieved in Primary Human Hepatocyte (PHH) Infection Models

[1045] To evaluate the gRNA mediated epi-editing in a more native context, primary human hepatocyte (PHH) infection models were used. Primary human hepatocytes from two donors (PHH Donor 1 and PHH Donor 2) were used for these experiments, with both donors infected with HBV at 100 GE/cell and infection allowed to develop for five days in culture. The cells were then transfected with mRNA encoding DNMT3A/L-dSpCas9-KRAB (SEQ ID NO: 644) and gRNA HBVg_22 (SEQ ID NO:412) and evaluated for repression via RNA isolation and qPCR. FIG. 15A shows repression of HBV RNA in both donors on day 7 and day 13/14. PHH donor 2 supported approximately 5 times higher levels of infection at baseline as compared to PHH donor 1 at the same dose. Despite the large differences in delivery efficiencies, both PHH donors showed strong and durable cccDNA repression with HBVg_22 (SEQ ID NO: 412).

[1046] Primary human hepatocytes from donor 1 were seeded on two collagen-coated 24-well plates at 0.2×10⁶ cells/cm². Twenty-four hours post seeding, cells were infected with HBV at 100 GE/cell and 200 GE/cell and evaluated for infection via RNA isolation and qPCR of the 3.5 kb HBV transcript. The cells were then transfected with mRNA encoding DNMT3A/L-dSpCas9-KRAB (SEQ ID NO: 644) and gRNA (SEQ ID NO:412) and were evaluated for repression after six days via RNA isolation and qPCR. FIG. 15B shows strong repression in the PHH infection models infected with low dose HBV (1×3.5 kb HBV transcript basally) and high dose HBV (12×3.5 kb transcript basally). The results show that significant repression was achieved in both low and high dose groups. The repression was maintained across a large window of HBV RNA expression (12-fold between both doses).

### Example 4: Comparison Between Repression Induced by dSpCas9-KRAB and DNMT3A/L-dSpCas9-KRAB Fusion Proteins

[1047] To compare the repression induced by dSpCas9-KRAB and DNMT3A/L-dSpCas9-KRAB fusion proteins, HepG2.NTCP and PxB PHH cells were transfected with mRNA encoding HBVg_22 (SEQ ID NO: 412) in combination with either dSpCas9-KRAB alone (SEQ ID NO:595) or DNMT3A/L-dSpCas9-KRAB (“D3AL-K”; SEQ ID NO: 645). The cells were evaluated for repression after either 20 days or 14 days via RNA isolation and qPCR. FIG. 16A-16B shows a comparison between repression induced by HBVg_22 (SEQ ID NO: 412) in combination with either dSpCas9-KRAB alone (SEQ ID NO:595) or DNMT3A/L-dSpCas9-KRAB (“D3AL-K”; SEQ ID NO: 645) fusion in HepG2.NTCP and PxB PHH models. Transient delivery of dCas9-KRAB alone can engender long-term repression of cccDNA across multiple cell contexts. However, transient delivery of dCas9-KRAB alone does not enable long-term repression of integrated HBV DNA. This shows that methylation (e.g., by D3AL-K) is required for durable transcriptional repression of HBV RNA from HBV integrants, and some degree of durable cccDNA silencing can be achieved without DNMTR3A/3L domains.

### Example 5: Multiplexed Targeted Transcriptional Repression for Promoting Phenotypes for Silencing HBV Replication and Expression

[1048] DNA-targeting systems comprising different combinations of the gRNAs identified in Example 2 were screened to identify conditions in which multiplexed targeted transcriptional repression of at least two genes or regulatory elements thereof promotes phenotypes for silencing HBV replication and expression.

[1049] DNA-targeting systems comprising gRNAs and an mRNA encoding a dSpCas9-effector are transiently transfected into cell lines expressing HBV from integrated sequences and cccDNA. gRNAs are transfected individually, or in combinations of 2 gRNAs, 3 gRNAs, or 4 gRNAs, with each gRNA targeting a different gene or regulatory elements. Alternatively, gRNAs are transfected individually, or in combinations of 2 gRNAs, 3 gRNAs, or 4 gRNAs, with each gRNA targeting a different target site within the same gene or regulatory element.

[1050] In one example, a combination of 2 gRNAs comprises a first gRNA targeting one of Enh1/X-promoter, Enh2/Basal core promoter, L-HBs promoter, M/S-HBs promoter, and a second gRNA targeting one of Enh1/X-promoter, Enh2/Basal core promoter, L-HBs promoter, and M/S-HBs promoter, wherein the first and second gRNA target different regulatory elements. In another example, a combination of 2 gRNAs comprises a first gRNA targeting Enh1/X-promoter and a second gRNA targeting one of Enh2/Basal core promoter, L-HBs promoter, and M/S-HBs promoter. In another example, a combination of 2 gRNAs comprises a first gRNA targeting Enh1/X-promoter and a second gRNA targeting L-HBs promoter.

[1051] In another example, a combination of 3 gRNAs comprises a first gRNA targeting one of Enh1/X-promoter, Enh2/Basal core promoter, L-HBs promoter, and M/S-HBs promoter, a second gRNA targeting one of Enh1/X-promoter, Enh2/Basal core promoter, L-HBs promoter, and M/S-HBs promoter, and a third gRNA targeting one of Enh1/X-promoter, Enh2/Basal core promoter, L-HBs promoter, wherein the second and third gRNA each target a different regulatory element. In another example, a combination of 3 gRNAs comprises a first gRNA targeting Enh1/X-promoter, a second gRNA targeting a Enh2/Basal core promoter, and a third gRNA targeting L-HBs promoter.

[1052] In another example, a combination of 4 gRNAs comprises a first gRNA targeting one of Enh1/X-promoter, Enh2/Basal core promoter, L-HBs promoter, and M/S-HBs promoter, a second gRNA targeting one of Enh1/X-promoter, Enh2/Basal core promoter, L-HBs promoter, and M/S-HBs promoter, a third gRNA targeting one of Enh1/X-promoter, Enh2/Basal core promoter, L-HBs promoter, and a fourth gRNA targeting one of Enh1/X-promoter, Enh2/Basal core promoter, L-HBs promoter, wherein the first, second, third, and fourth gRNA targets a different regulatory element.

[1053] In another example, a combination of 3 gRNAs comprises a first gRNA targeting one of L-HBs promoter, and M/S-HBs promoter, a second gRNA targeting the Enh2/Basal core promoter, and a third gRNA targeting the Enh1/X-promoter.

[1054] In another example, a combination of 4 gRNAs comprises gRNAs targeting each of the L-HBs and M/S-HBs promoters, and a gRNA targeting the Enh2/Basal core promoter.

[1055] Following transfection, cells are assessed for phenotypes that could promote phenotypes for silencing HBV replication and expression. Specifically, transfected cells are assessed for transcriptional repression of the targeted HBV transcripts by qRT-PCR measurement of total HBV RNA transcript levels or 3.5 kb HBV RNA transcript levels. In addition, conditions are identified in which multiplexed targeted repression of a combination of genes and/or regulatory elements thereof (e.g. Enh1/X-promoter and L-HBs promoter) leads to reduced HBV RNA than targeted repression of any individual gene of the combination alone (e.g. Enh1/X-promoter alone or L-HBs promoter alone).

[1056] DNA-targeting systems with combinations of gRNAs are identified that mediate multiplexed targeted transcriptional repression to silence HBV replication and expression.

[1057] FIG. 17 shows combinations of gRNAs that mediate multiplexed targeted transcriptional repression of different regions within the HBV RNA in Hep3B cells. Multiple gRNAs that mediated the most repression were pooled and compared to repression induced by single gRNAs (e.g., “best single gRNAs” such as HBVg_26, HBVg_63, HBVg_29, and HBVg_121) and non-targeted gRNAs. The gRNAs were transfected via lipofection with standard dose (20 ng) pooled to maintain a 1× dosage (e.g., “pooled top gRNAs”=1×/4=5 ng per, or “all 16 gRNAs”=1×/16=1.25 ng per) for high expression. As shown in FIG. 17, gRNAs targeting different regions mediated repression as compared to the non-targeting control. However, combinations of multiple gRNAs did not always significantly improve repression as compared to single gRNAs. For example, HBVg_26 (SEQ ID NO: 416) alone mediated comparable repression as compared to a pool of top gRNAs (a combination of HBVg_26 (SEQ ID NO: 416), HBVg_182 (SEQ ID NO: 572), HBVg_185 (SEQ ID NO: 575), and HBVg_152 (SEQ ID NO: 542)) in the M/S-HBs promoter region. However, a pool of the top gRNA at the L-HBs promoter, or a pool with the top single gRNA from each promoter was able to increase repression relative to the best single gRNA from the L-HBs promoter. Together this highlights the context sensitivity for multiplexing gRNA in relation to HBV repression.

[1058] Combinations of gRNAs were tested for multiplexed transcriptional repression in a PLC/PRF/5 (Alexander) cell model with poor lipofection capacity. PLC/PRF/5 is a human liver cancer cell line that produces all isoforms of hepatitis B virus surface antigen (HbsAg), including L-HBs, M-HBs, and S-HBs. The cell line contains 8-10 integrations of the HBV as compared to approximately 2 integrations and M/S-HBs isoforms in Hep3B cells. Fourteen days post lipofection with an mRNA encoding D3AL-K and various gRNA combinations, RNA was harvested and a qPCR was run for Total HBV RNA. FIG. 18 shows that HBVg_22 (SEQ ID NO: 412) alone mediated the greatest repression at day 14, followed by HBVg_63 (SEQ ID NO: 453) and HBVg_20 (SEQ ID NO: 410). Many gRNAs do not have functional targeting in these cells. Multiplexing gRNAs did not significantly improve (or hinder) repression as compared to HBVg_22 (SEQ ID NO: 412) alone.

[1059] In another multiplexed assay, PXB primary human hepatocytes (PHH) cells were infected with HBV at a multiplicity of infection (MOI) of 100 and allowed to progress for five days. The cells were then lipofected with DNMT3A/L-dSpCas9-KRAB (SEQ ID NO: 644) and various multiplexed gRNA mixtures, such that each gRNA was dosed at 0.5×. Repression of pgRNA was assayed at day 7 and day 14 post-lipofection. FIG. 19 shows comparable durability of multiplexed targeted transcriptional repression mediated by HBVg_22 (SEQ ID NO: 412), HBVg_185 (SEQ ID NO: 575), and HBVg_26 (SEQ ID NO: 416).

### Example 6. On-Target Methylation of cccDNA and Integrated HBV DNA

[1060] To evaluate target specificity, HepG2.NTCP cells were transfected with either lipid only control, non-targeting gRNA control with an mRNA encoding either a DNMT3A/L-dSpCas9-KRAB fusion construct (SEQ ID NO: 644), dSpCas9-KRAB construct (SEQ ID NO: 594) with a gRNA (demethylase-null control), or with the DNMT3A/L-dSpCas9-KRAB fusion construct (SEQ ID NO: 644) in combination with a gRNA, at maximum dose (FIGS. 20A and B). Methyl capture sequencing using a custom HBV Methylome library was performed three days after lipofection. As seen in FIG. 20A, little to no methylation was seen in the lipid only, non-targeting, and demethylase-null controls. However, the DNMT3A/L-dSpCas9-KRAB fusion (SEQ ID NO: 644) in combination with various gRNAs (FIG. 20B) showed targeted and distinct patters of methylation across the HBV genome in unenriched total HBV DNA pool. Methyl sequencing confirmed specific and robust methylation pattern deposited by the DNMT3A/L-dSpCas9-KRAB fusion protein across the HBV genome. FIG. 21 shows increased methylation patterns in integrated HBV DNA following delivery of mRNA encoding DNMT3A/L-dSpCas9-KRAB along with various gRNA (HBVg_22 (SEQ ID NO: 412), HBVg_26 (SEQ ID NO: 416), HBVg_63 (SEQ ID NO: 453), HBVg_185 (SEQ ID NO: 575) in Hep3B cells. These methylation patterns showed similar trends across the HBV genome to those seen in cccDNA in FIG. 20B. FIG. 22 shows methylation patterns following nuclei isolation in HBV-infected PHH donor #1 (100 Ge/cell) following transient lipofection with HBVg_22 (SEQ ID NO: 412) and mRNA encoding D3AL-K. This isolation of nuclei prior to Methyl-seq reduces rcDNA contamination in the preps and allows for enrichment of the cccDNA signal (55% of HBV DNA captured). This methylation data is similar to other patterns seen for HBVg_22 (SEQ ID NO: 412), and highlights the durability of these epi-genetic changes over time.

[1061] Following lipofection of various HBV targeting gRNAs and mRNA at the maximum dose in HepG2.NTCP cells without viral infection, RNA sequencing was performed to assess differential changes to gene expression in non-targeted regions. FIG. 23A depicts a comparison of the epi-editor DNMT3A/L-dSpCas9-KRAB fusion (SEQ ID NO: 645) with targeting gRNAs versus epi-editor DNMT3A/L-dSpCas9-KRAB fusion (SEQ ID NO: 645) with non-targeting gRNAs. The results show no significantly altered gene expression relative to control non-targeting gRNA as a result of the gRNA HBVg_22 (SEQ ID NO: 412) three days post lipofection. FIG. 23B depicts a comparison of the epi-methylation-mediated effects by comparing differentially expressed transcripts following delivery of HBVg_22 (SEQ ID NO: 412) with either an mRNA encoding D3AL-K (SEQ ID NO: 644) or without the DNMT3A/3L domain (dCas9-KRAB, SEQ ID NO: 594), showing effectively no D3AL-mediated changes to gene expression. FIG. 23C shows minimal changes in differentially-expressed genes (DEG) mediated by the gRNAs three days post-lipofection. Most observed changes were shared across more than one gRNA (“Shared DEG”) and were usually transient cell responses to RNA delivery and innate immune response related genes. A majority of the candidate gRNAs analyzed imparted minimal to no off-target differential expression with similarly low levels of off-target gene expression compared to that of a non-targeting gRNA. Additionally, LNPs encapsulating an mRNA encoding DNMT3A/L-dCas9-KRAB along with either HBVg_22 (SEQ ID NO: 412) or a non-targeting gRNA were delivered to primary human hepatocytes at 3 different levels (50 ng, 250 ng, 500 ng per well in a 24 well-plate). Following delivery of these LNPs, RNA was harvested from PHHs at Day 5 and Day 19 post-lipofection and RNA-sequencing was performed. These results showed no differentially expressed genes ([FDR <0.01, abs(L2FC)>1]) between non-targeting gRNA and HBVg_22 (SEQ ID NO: 412) at any dosage or timepoint (FIG. 23D). Very few transcriptional changes were seen relative to carrier-only PHH-HBVg_22 (SEQ ID NO: 412) performs similar to non-targeting control gRNA, and there was only one differentially-expressed gene remaining at Day 19 at the highest dosage.

### Example 7: In Vivo Evaluation of HBV Repression in Human Chimeric Liver Mouse Study of HepB

[1062] In this Example, a human chimeric liver mouse model (FRG) with high engraftment of human cells into the mouse liver was used. In this mouse model, mice were engrafted with human hepatocytes (more than 70% humanization) and then infected with HBV. The mouse model has several advantages including, presence of a true cccDNA with the native structure, human intracellular epigenetic machinery to interact with the epi-editor, a human genomic background, and reproduction of biologically relevant endpoints (HBV DNA, HBsAg, HBeAg) used in clinical trials.

[1063] Mice were infected with approximately 1×10⁸ HBV genomes via tail vein injections. As shown in FIG. 24, the viral infection was allowed to continue until a plateau phase of HBV DNA was reached (1-2 months post tail vein injection). The plateau phase is an indication that a chronic stabilized infection, comprising mostly cccDNA, with a very sparse degree of HBV integrations, has been established.

[1064] Once the chronic stabilized infection was established, the mice were dosed with standard of care treatment (e.g., nucleoside analog such as Entecavir, “ETV”) with 1 pg/ml ETV added to drinking water. At day 81, the mice were administered either a) a combination of exemplary epi-editor mRNA with non-targeting gRNA or b) a combination of exemplary epi-editor mRNA and gRNA(s) targeting the HBV genome. The mice were dosed with a single gRNA or multiple gRNAs targeting the same or different genes in a multiplexed approach (as described in Example 4). Mice were grouped into cohorts and administered either 1) non-targeting gRNA (nt1) (n=9), 2) gRNA targeting HBx HBVg_22 (SEQ ID NO: 412) (n=9), 3) GalNAc-conjugated LNPs carrying gRNA HBVg_22 (SEQ ID NO: 412) (n=3), 4) gRNA targeting HBs HBVg_185 (SEQ ID NO: 575) (n=7), 5) gRNA HBVg_22 (SEQ ID NO: 412) and HBVg_185 (SEQ ID NO: 575) (n=7), 6) gRNA HBVg_73 (SEQ ID NO: 463) and 7) non targeting gRNA (nt1) (n=7), 8) gRNA HBVg_22 (SEQ ID NO: 412) (n=7). The combination of epi-editor mRNA (either DNMT3A/L-dCas9-KRAB (SEQ ID NO: 644) or dSpCas9-KRAB construct (SEQ ID NO: 594) for groups 7/8) and gRNAs were delivered at 2 milligrams per kilogram (mpk) doses via lipid nanoparticle delivery systems and RO injection, which allowed for delivery to only 50-60% of the human hepatocytes on average (as determined by protein immune-labeling). N-Acetylgalactosamine (GalNAc) conjugated-LNP in group 3) was administered to improve delivery of the LNP to the hepatocytes in the FRG mouse model. All subjects were assessed with serum draws as indicated and at the study endpoint (Day 130). The mice were evaluated for repression by monitoring the levels of HBV biomarkers, including HBV pre-genomic RNA (pgRNA), total HBV DNA in serum, HBeAg proteins in serum, and HbsAg proteins in serum. The changes in the levels of biomarkers were indicative of strong repression of viral replication and transcription to all cells delivered to in the human chimeric liver mouse. The mice may be further evaluated for effects of multiplexed repression on efficacy and durability, in vivo HBV methylation patterns, or on strength of repression after re-dosing.

[1065] A biodistribution mouse cohort (n=12) was harvested after 18 hours post administration to assess delivery efficiency across multiple delivery modalities. Prior to evaluating repression in the main cohort, a sentinel redosing cohort was redosed at either 1 mpk, 2 mpk, or 3 mpk to test tolerability. The mice were also redosed after 21 days or 24 days (approximately at day 102 of the mouse study).

[1066] As shown in FIG. 25, approximately 50% repression of HBsAg and HBV DNA was seen with an exemplary gRNA HBVg_22 (SEQ ID NO: 412) five days post administration (Day 86). FIG. 26 shows fold change in the post-dose (day 5) to pre-dose (2 days prior) metric highlighting the levels of repression. These data represent strong evidence that the gRNA combined with the fusion protein induced near complete repression in vivo with native cccDNA.*=p<0.05, **=p<0.01, and ***=p<0.001 with students paired t-test)

[1067] A redosing cohort was evaluated after redosing the mice with 2 mpk gRNA after 21 days from the start of the study outlined in FIG. 24. As shown in FIGS. 27A-27D, there was an improvement in repression after redosing with HBVg_22 (SEQ ID NO: 412) either alone or multiplexed with HBVg_185 (SEQ ID NO: 575), or when delivered by an LNP conjugated with GalNAc, in combination with either an mRNA encoding a dSpCas9-KRAB fusion protein (SEQ ID NO:594) (FIGS. 27A-C) or DNMT3A/L-dSpCas9-KRAB (FIG. 27D).

[1068] An additional human chimeric FRG mouse study was run with a similar chronic infection phase, followed by a similar ETV dosing phase prior to LNP administration. All LNPs used in this study were conjugated along with 0.15% molecular weight of GalNAc-PEG lipid to improve delivery in this chimeric mouse context. Following a single 2mpk RO injection of LNP containing either HBVg_22 (SEQ ID NO: 412) or a non-targeting gRNA along with an mRNA encoding DNMT3A/3L-dSpCas9-KRAB. Following this single dose, there was durable repression of serum HBeAg and HBsAg protein levels, as well similar reductions in serum HBV DNA levels out to Day 33 post LNP administration when compared to the non-targeting gRNA (FIG. 28A). Single mouse tracks of the degree of repression highlight the consistency of response seen across animals in these serum HBV protein metrics (FIG. 28B). Mice were harvested 72 hrs post LNP administration, tissues were fixed with formalin overnight, and samples were subjected to multi-channel RNAscope to show individual mRNA molecules in the cells (FIG. 28C). In regions with high Cas9 mRNA signal at this timepoint, we are able to see marked reductions in pgRNA signal in HBVg_22 (SEQ ID NO: 412)-delivered mice as compared to mice that received a non-targeting gRNA, with most remaining pgRNA signal being extracellular in the HBVg_22 (SEQ ID NO: 412) groups (FIG. 28A).

### Example 8: Identification of Zinc Finger Proteins for Targeted Transcriptional Repression of Genes and Regulatory Elements Thereof Associated with Viral Replication and Transcription

[1069] Engineered zinc finger proteins (eZFPs) were designed to bind to genes and regulatory elements of HBV associated with viral replication and transcription. Fusion proteins (eZFP-KRAB fusion proteins) comprising KRAB and one of 122 designed eZFPs were transduced into Hep3B cells to identify eZFPs with the highest transcriptional repression.

[1070] The eZFPs were designed as described in Section I-C. The mRNA encoding the fusion proteins was generated and transfected via lipofectamine into Hep3B cells in two batches (FIGS. 29A and 29B). The cells expressing the eZFP-KRAB fusion proteins (3×FLAG-SV40NLS-eZFP-SV40NLS-KRAB fusion proteins) were assessed by qPCR for HBV RNA levels after three days. The mRNA levels were compared to cells transfected with pTIT183 (a dCas9-KRAB control) in combination with either HBVg_22 or HBVg_63. Negative controls included a TriLink GFP control, a non-targeting zinc finger protein pZFPq131 that does not bind any unique 8 bp sequence in the human genome, and non-targeting gRNA. Twenty-eight of the eZFP-KRAB fusion proteins screened led to decreased HBV mRNA levels in the Hep3B cells on Day 3 (FIGS. 29A and 29B1; see also Table E4). These included the eZFP-KRAB fusion proteins set forth in SEQ ID NOs: 944-971 (Table E5), that targeted the target sites set forth in SEQ ID NOs: 1028-1055.

TABLE E4
eZFPs targeting genes and regulatory elements associated with HBV replication and
transcription

| | | | | | exemplary |
|---|---|---|---|---|---|
| | | | | | nucleotide |
| | | | | AA | encoding |
| | Target | | | Sequence | sequence |
| eZFP | Site | Recognition | Amino | SEQ | SEQ ID |
| Name | Sequence | Regions F1-F6 | Acid (AA) Sequence | ID NO: | NO: |
| eZFP_ | CAAGT | F1: SEADRSR (SEQ ID | AAMAERPFQCRICMRNFSS | 692 | 888 |
| 1 | GTTTG | NO: 720) | EADRSRHIRTHTGEKPFAC | | |
| | CTGAC | F2: DRSNLTR (SEQ ID | DICGRKFADRSNLTRHTKIH | | |
| | GCA | NO: 721) | TGSQKPFQCRICMRNFSQSS | | |
| | (SEQ ID | F3: QSSDLSR | DLSRHIRTHTGEKPFACDIC | | |
| | NO: 1028) | (SEQ ID NO: 722) | GRKFAYHWYLKKHTKIHT | | |
| | | F4: YHWYLKK (SEQ ID | GSQKPFQCRICMRNFSRSDS | | |
| | | NO: 723) | LSVHIRTHTGEKPFACDICG | | |
| | | F5: RSDSLSV | RKFAQNANRKTHTKIHLRQ | | |
| | | (SEQ ID NO: 724) | KDAAR | | |
| | | F6: QNANRKT (SEQ ID | | | |
| | | NO: 725) | | | |
| eZFP_ | GGCTG | F1: RSDVLST | AAMAERPFQCRICMRNFSR | 693 | 889 |
| 2 | GGGCT | (SEQ ID NO: 726) | SDVLSTHIRTHTGEKPFACD | | |
| | TGGTC | F2: DNSSRTR (SEQ ID | ICGKKFADNSSRTRHTKIHT | | |
| | ATG | NO: 727) | GSQKPFQCRICMRNFSRPYT | | |
| | (SEQ ID | F3: RPYTLRL | LRLHIRTHTGEKPFACDICG | | |
| | NO: 1029) | (SEQ ID NO: 728) | RKFADSSHRTRHTKIHTGS | | |
| | | F4: DSSHRTR (SEQ ID | QKPFQCRICMRNFSRSDHLS | | |
| | | NO: 729) | QHIRTHTGEKPFACDICGRK | | |
| | | F5: RSDHLSQ (SEQ ID | FADSSHRTRHTKIHLRQKD | | |
| | | NO: 730) | AAR | | |
| | | F6: DSSHRTR (SEQ ID | | | |
| | | NO: 731) | | | |
| eZFP_ | GCTGG | F1: RSDHLSQ (SEQ ID | AAMAERPFQCRICMRNFSR | 694 | 890 |
| 3 | GGCTT | NO: 732) | SDHLSQHIRTHTGEKPFACD | | |
| | GGTCA | F2: QSADRTK (SEQ ID | ICGRKFAQSADRTKHTKIHT | | |
| | TGG | NO: 733) | GSQKPFQCRICMRNFSRSD | | |
| | (SEQ ID | F3: RSDHLSQ (SEQ ID | HLSQHIRTHTGEKPFACDIC | | |
| | NO: 1030) | NO: 734) | GRKFARRSDLKRHTKIHTG | | |
| | | F4: RRSDLKR (SEQ ID | SQKPFQCRICMRNFSRSDHL | | |
| | | NO: 735) | SRHIRTHTGEKPFACDICGR | | |
| | | F5: RSDHLSR (SEQ ID | KFAQSSDLRRHTKIHLRQK | | |
| | | NO: 736) | DAAR | | |
| | | F6: QSSDLRR (SEQ ID | | | |
| | | NO: 737) | | | |
| eZFP_ | TTGGT | F1: RSDNLSE | AAMAERPFQCRICMRNFSR | 695 | 891 |
| 4 | CATGG | (SEQ ID NO: 738) | SDNLSEHIRTHTGEKPFACD | | |
| | GCCAT | F2: TSSNRKT | ICGRKFATSSNRKTHTKIHT | | |
| | CAG | (SEQ ID NO: 739) | GSQKPFQCRICMRNFSDRS | | |
| | (SEQ ID | F3: DRSHLTR (SEQ ID | HLTRHIRTHTGEKPFACDIC | | |
| | NO: 1031) | NO: 740) | GRKFARSDALTQHTKIHTG | | |
| | | F4: RSDALTQ (SEQ ID | SQKPFQCRICMRNFSDRSAL | | |
| | | NO: 741) | ARHIRTHTGEKPFACDICGR | | |
| | | F5: DRSALAR (SEQ ID | KFARRFTLSKHTKIHLRQK | | |
| | | NO: 742) | DAAR | | |
| | | F6: RRFTLSK | | | |
| | | (SEQ ID NO: 743) | | | |
| eZFP_ | TGCGT | F1: RSDHLSE | AAMAERPFQCRICMRNFSR | 696 | 892 |
| 5 | GGAAC | (SEQ ID NO: 744) | SDHLSEHIRTHTGEKPFACD | | |
| | CTTTT | F2: QYSGRYY (SEQ ID | ICGRKFAQYSGRYYHTKIH | | |
| | CGG | NO: 745) | TGSQKPFQCRICMRNFSHG | | |
| | (SEQ ID | F3: HGQTLNE (SEQ ID | QTLNEHIRTHTGEKPFACDI | | |
| | NO: 1032) | NO: 746) | CGRKFAQSGNLARHTKIHT | | |
| | | F4: QSGNLAR (SEQ ID | GSQKPFQCRICMRNFSRSDS | | |
| | | NO: 747) | LLRHIRTHTGEKPFACDICG | | |
| | | F5: RSDSLLR | RKFACREYRGKHTKIHLRQ | | |
| | | (SEQ ID NO: 748) | KDAAR | | |
| | | F6: CREYRGK (SEQ ID | | | |
| | | NO: 749) | | | |
| eZFP_ | GCAGC | F1: QSANRTT (SEQ ID | AAMAERPFQCRICMRNFSQ | 697 | 893 |
| 6 | AGGTC | NO: 750) | SANRTTHIRTHTGEKPFACD | | |
| | TGGAG | F2: RSANLTR (SEQ ID | ICGRKFARSANLTRHTKIHT | | |
| | CAA | NO: 751) | GSQKPFQCRICMRNFSRSD | | |
| | (SEQ ID | F3: RSDVLSE | VLSEHIRTHTGEKPFACDIC | | |
| | NO: 1033) | (SEQ ID NO: 752) | GRKFATSGHLSRHTKIHTGS | | |
| | | F4: TSGHLSR | QKPFQCRICMRNFSQSSDLS | | |
| | | (SEQ ID NO: 753) | RHIRTHTGEKPFACDICGRK | | |
| | | F5: QSSDLSR | FAQWSTRKRHTKIHLRQKD | | |
| | | (SEQ ID NO: 754) | AAR | | |
| | | F6: QWSTRKR (SEQ ID | | | |
| | | NO: 755) | | | |
| eZFP_ | CAGCA | F1: QSGNLAR (SEQ ID | AAMAERPFQCRICMRNFSQ | 698 | 894 |
| 7 | GGTCT | NO: 756) | SGNLARHIRTHTGEKPFAC | | |
| | GGAGC | F2: ATCCLAH (SEQ ID | DICGRKFAATCCLAHHTKI | | |
| | AAA | NO: 757) | HTGSQKPFQCRICMRNFSR | | |
| | (SEQ ID | F3: RWQYLPT (SEQ ID | WQYLPTHIRTHAGEKPFAC | | |
| | NO: 1034) | NO: 758) | DICGRKFADRSALARHTKI | | |
| | | F4: DRSALAR (SEQ ID | HTGSQKPFQCRICMRNFSRS | | |
| | | NO: 759) | DNLSEHIRTHTGEKPFACDI | | |
| | | F5: RSDNLSE | CGRKFAKRCNLRCHTKIHL | | |
| | | (SEQ ID NO: 760) | RQKDAAR | | |
| | | F6: KRCNLRC (SEQ ID | | | |
| | | NO: 761) | | | |
| eZFP_ | AGCAG | F1: NPANLTR (SEQ ID | AAMAERPFQCRICMRNFSN | 699 | 895 |
| 8 | GTCTG | NO: 762) | PANLTRHIRTHTGEKPFACD | | |
| | GAGCA | F2: QNATRTK (SEQ ID | ICGRKFAQNATRTKHTKIH | | |
| | AAC | NO: 763) | TGSQKPFQCRICMRNFSQS | | |
| | (SEQ ID | F3: QSGHLAR (SEQ ID | GHLARHIRTHTGEKPFACDI | | |
| | NO: 1035) | NO: 764) | CGRKFANRHDRAKHTKIHT | | |
| | | F4: NRHDRAK (SEQ ID | GSQKPFQCRICMRNFSRSD | | |
| | | NO: 765) | HLSEHIRTHTGEKPFACDIC | | |
| | | F5: RSDHLSE | GRKFAQRRSRYKHTKIHLR | | |
| | | (SEQ ID NO: 766) | QKDAAR | | |
| | | F6: QRRSRYK (SEQ ID | | | |
| | | NO: 767) | | | |
| eZFP_ | ATCGT | F1: QSSDLSR | AAMAERPFQCRICMRNFSQ | 700 | 896 |
| 9 | ATCCA | (SEQ ID NO: 768) | SSDLSRHIRTHTGEKPFACD | | |
| | TGGCT | F2: HRSTRNR (SEQ ID | ICGRKFAHRSTRNRHTKIHT | | |
| | GCT | NO: 769) | GSQKPFQCRICMRNFSRSD | | |
| | (SEQ ID | F3: RSDVLSA (SEQ ID | VLSAHIRTHTGEKPFACDIC | | |
| | NO: 1036) | NO: 770) | GRKFADSRTRKNHTKIHTG | | |
| | | F4: DSRTRKN (SEQ ID | SQKPFQCRICMRNFSQSGSL | | |
| | | NO: 771) | TRHIRTHTGEKPFACDICGR | | |
| | | F5: QSGSLTR | KFADQSGLAHHTKIHLRQK | | |
| | | (SEQ ID NO: 772) | DAAR | | |
| | | F6: DQSGLAH (SEQ ID | | | |
| | | NO: 773) | | | |
| eZFP_ | CCAGT | F1: QNPAQWR (SEQ ID | AAMAERPFQCRICMRNFSQ | 701 | 897 |
| 10 | GGGG | NO: 774) | NPAQWRHIRTHTGEKPFAC | | |
| | GTTGC | F2: RSADLSR (SEQ ID | DICGRKFARSADLSRHTKIH | | |
| | GTCA | NO: 775) | TGSQKPFQCRICMRNFSTSG | | |
| | (SEQ ID | F3: TSGSLSR | SLSRHIRTHTGEKPFACDIC | | |
| | NO: 1037) | (SEQ ID NO: 776) | GRKFARSDHLSRHTKIHTG | | |
| | | F4: RSDHLSR (SEQ ID | SQKPFQCRICMRNFSRSDSL | | |
| | | NO: 777) | LRHIRTHTGEKPFACDICGR | | |
| | | F5: RSDSLLR | KFAQSYDRFQHTKIHLRQK | | |
| | | (SEQ ID NO: 778) | DAAR | | |
| | | F6: QSYDRFQ (SEQ ID | | | |
| | | NO: 779) | | | |
| eZFP_ | CCCCA | F1: TSGSLSR | AAMAERPFQCRICMRNFST | 702 | 898 |
| 11 | GCCAG | (SEQ ID NO: 780) | SGSLSRHIRTHTGEKPFACD | | |
| | TGGGG | F2: RSDHLSR (SEQ ID | ICGRKFARSDHLSRHTKIHT | | |
| | GTT | NO: 781) | GSQKPFQCRICMRNFSRSDS | | |
| | (SEQ ID | F3: RSDSLL | LLRHIRTHTGEKPFACDICG | | |
| | NO: 1038) | (SEQ ID NO: 782) | RKFAQSYDRFQHTKIHTGS | | |
| | | F4: QSYDRFQ (SEQ ID | QKPFQCRICMRNFSRSDNLS | | |
| | | NO: 783) | THIRTHTGEKPFACDICGRK | | |
| | | F5: RSDNLST | FADNRDRIKHTKIHLRQKD | | |
| | | (SEQ ID NO: 784) | AAR | | |
| | | F6: DNRDRIK (SEQ ID | | | |
| | | NO: 785) | | | |
| eZFP_ | GCGCT | F1: DRSNLSR (SEQ ID | AAMAERPFQCRICMRNFSD | 703 | 899 |
| 12 | GATGG | NO: 786) | RSNLSRHIRTHTGEKPFACD | | |
| | CCCAT | F2: LRQNLIM (SEQ ID | ICGRKFALRQNLIMHTKIHT | | |
| | GAC | NO: 787) | GSQKPFQCRICMRNFSERG | | |
| | (SEQ ID | F3: ERGTLAR (SEQ ID | TLARHIRTHTGEKPFACDIC | | |
| | NO: 1039) | NO: 788) | GRKFARSDALTQHTKIHTG | | |
| | | F4: RSDALTQ (SEQ ID | SQKPFQCRICMRNFSRSDSL | | |
| | | NO: 789) | SQHIRTHTGEKPFACDICGR | | |
| | | F5: RSDSLSQ | KFARKADRTRHTKIHLRQK | | |
| | | (SEQ ID NO: 790) | DAAR | | |
| | | F6: RKADRTR (SEQ ID | | | |
| | | NO: 791) | | | |
| eZFP_ | CACGC | F1: QYCCLTN (SEQ ID | AAMAERPFQCRICMRNFSQ | 704 | 900 |
| 13 | ACGCG | NO: 792) | YCCLTNHIRTHTGEKPFAC | | |
| | CTGAT | F2: TSGNLTR (SEQ ID | DICGRKFATSGNLTRHTKIH | | |
| | GGC | NO: 793) | TGSQKPFQCRICMRNFSQSS | | |
| | (SEQ ID | F3: QSSDLSR | DLSRHIRTHTGEKPFACDIC | | |
| | NO: 1040) | (SEQ ID NO: 794) | GRKFAFRYYLKRHTKIHTG | | |
| | | F4: FRYYLKR (SEQ ID | SQKPFQCRICMRNFSQSGD | | |
| | | NO: 795) | LTRHIRTHTGEKPFACDICG | | |
| | | F5: QSGDLTR (SEQ ID | RKFADKGNLTKHTKIHLRQ | | |
| | | NO: 796) | KDAAR | | |
| | | F6: DKGNLTK (SEQ ID | | | |
| | | NO: 797) | | | |
| eZFP_ | AGAG | F1: TSGSLSR | AAMAERPFQCRICMRNFST | 705 | 901 |
| 14 | GAGCC | (SEQ ID NO: 798) | SGSLSRHIRTHTGEKPFACD | | |
| | GAAA | F2: RSDNLTT (SEQ ID | ICGRKFARSDNLTTHTKIHT | | |
| | AGGTT | NO: 799) | GSQKPFQCRICMRNFSQSG | | |
| | (SEQ ID | F3: QSGNLAR (SEQ ID | NLARHIRTHTGEKPFACDIC | | |
| | NO: 1041) | NO: 800) | GRKFADRTTLMRHTKIHTG | | |
| | | F4: DRTTLMR (SEQ ID | SQKPFQCRICMRNFSQSGH | | |
| | | NO: 801) | LARHIRTHTGEKPFACDICG | | |
| | | F5: QSGHLAR (SEQ ID | RKFAQLTHLNSHTKIHLRQ | | |
| | | NO: 802) | KDAAR | | |
| | | F6: QLTHLNS (SEQ ID | | | |
| | | NO: 803) | | | |
| eZFP_ | GGATC | F1: IKHDLHR (SEQ ID | AAMAERPFQCRICMRNFSI | 706 | 902 |
| 15 | GGCAG | NO: 804) | KHDLHRHIRTHTGEKPFAC | | |
| | AGGA | F2: RSANLTR (SEQ ID | DICGRKFARSANLTRHTKIH | | |
| | GCCG | NO: 805) | TGSQKPFQCRICMRNFSRSD | | |
| | (SEQ ID | F3: RSDNLAR (SEQ ID | NLARHIRTHTGEKPFACDIC | | |
| | NO: 1042) | NO: 806) | GRKFAQNVSRPRHTKIHTG | | |
| | | F4: QNVSRPR (SEQ ID | SQKPFQCRICMRNFSRSDDL | | |
| | | NO: 807) | SKHIRTHTGEKPFACDICGR | | |
| | | F5: RSDDLSK (SEQ ID | KFADSSHRTRHTKIHLRQK | | |
| | | NO: 808) | DAAR | | |
| | | F6: DSSHRTR (SEQ ID | | | |
| | | NO: 809) | | | |
| eZFP_ | CAGTA | F1: RSDNLAR (SEQ ID | AAMAERPFQCRICMRNFSR | 707 | 903 |
| 16 | TGGAT | NO: 810) | SDNLARHIRTHTGEKPFAC | | |
| | CGGCA | F2: QNVSRPR (SEQ ID | DICGRKFAQNVSRPRHTKIH | | |
| | GAG | NO: 811) | TGSQKPFQCRICMRNFSRSD | | |
| | (SEQ ID | F3: RSDDLSK (SEQ ID | DLSKHIRTHTGEKPFACDIC | | |
| | NO: 1043) | NO: 812) | GRKFADSSHRTRHTKIHTG | | |
| | | F4: DSSHRTR (SEQ ID | SQKPFQCRICMRNFSTSSNR | | |
| | | NO: 813) | KTHIRTHTGEKPFACDICGR | | |
| | | F5: TSSNRKT | KFAAQWTRACHTKIHLRQ | | |
| | | (SEQ ID NO: 814) | KDAAR | | |
| | | F6: AQWTRAC (SEQ ID | | | |
| | | NO: 815) | | | |
| eZFP_ | GTTCC | F1: RSDDLSK (SEQ ID | AAMAERPFQCRICMRNFSR | 708 | 904 |
| 17 | GCAGT | NO: 816) | SDDLSKHIRTHTGEKPFACD | | |
| | ATGGA | F2: DSSHRTR (SEQ ID | ICGRKFADSSHRTRHTKIHT | | |
| | TCG | NO: 817) | GSQKPFQCRICMRNFSTSSN | | |
| | (SEQ ID | F3: TSSNRKT | RKTHIRTHTGEKPFACDICG | | |
| | NO: 1044) | (SEQ ID NO: 818) | RKFAAQWTRACHTKIHTGS | | |
| | | F4: AQWTRAC (SEQ ID | QKPFQCRICMRNFSRKQTR | | |
| | | NO: 819) | TTHIRTHTGEKPFACDICGR | | |
| | | F5: RKQTRTT (SEQ ID | KFAHRSSLRRHTKIHLRQK | | |
| | | NO: 820) | DAAR | | |
| | | F6: HRSSLRR | | | |
| | | (SEQ ID NO: 821) | | | |
| eZFP_ | GGAGT | F1: QSAHRKN (SEQ ID | AAMAERPFQCRICMRNFSQ | 709 | 905 |
| 18 | TCCGC | NO: 822) | SAHRKNHIRTHTGEKPFAC | | |
| | AGTAT | F2: TSSNRKT | DICGRKFATSSNRKTHTKIH | | |
| | GGA | (SEQ ID NO: 823) | TGSQKPFQCRICMRNFSRSD | | |
| | (SEQ ID | F3: RSDNLSA (SEQ ID | NLSAHIRTHTGEKPFACDIC | | |
| | NO: 1045) | NO: 824) | GRKFARNNDRKTHTKIHTG | | |
| | | F4: RNNDRKT (SEQ ID | SQKPFQCRICMRNFSTSGSL | | |
| | | NO: 825) | SRHIRTHTGEKPFACDICGR | | |
| | | F5: TSGSLSR | KFAQAGHLAKHTKIHLRQK | | |
| | | (SEQ ID NO: 826) | DAAR | | |
| | | F6: QAGHLAK (SEQ ID | | | |
| | | NO: 827) | | | |
| eZFP_ | GCAAA | F1: RSDHLSQ (SEQ ID | AAMAERPFQCRICMRNFSR | 710 | 906 |
| 19 | ACAAG | NO: 828) | SDHLSQHIRTHTGEKPFACD | | |
| | CGGCT | F2: ASSTRTK | ICGRKFAASSTRTKHTKIHT | | |
| | AGG | (SEQ ID NO: 829) | GSQKPFQCRICMRNFSRSD | | |
| | (SEQ ID | F3: RSDDLTR (SEQ ID | DLTRHIRTHTGEKPFACDIC | | |
| | NO: 1046) | NO: 830) | GRKFAQKSNLSSHTKIHTGS | | |
| | | F4: QKSNLSS | QKPFQCRICMRNFSQSANR | | |
| | | (SEQ ID NO: 831) | TTHIRTHTGEKPFACDICGR | | |
| | | F5: QSANRTT (SEQ ID | KFAQNATRTKHTKIHLRQK | | |
| | | NO: 832) | DAAR | | |
| | | F6: QNATRTK (SEQ ID | | | |
| | | NO: 833) | | | |
| eZFP_ | TTTGC | F1: RSDTLSE | AAMAERPFQCRICMRNFSR | 711 | 907 |
| 20 | TCCAG | (SEQ ID NO: 834) | SDTLSEHIRTHTGEKPFACD | | |
| | ACCTG | F2: RRWTLVG (SEQ ID | ICGRKFARRWTLVGHTKIH | | |
| | CTG | NO: 835) | TGSQKPFQCRICMRNFSDRS | | |
| | (SEQ ID | F3: DRSNLSR (SEQ ID | NLSRHIRTHTGEKPFACDIC | | |
| | NO: 1047) | NO: 836) | GRKFAQSGDLTRHTKIHTG | | |
| | | F4: QSGDLTR (SEQ ID | SQKPFQCRICMRNFSQSSDL | | |
| | | NO: 837) | SRHIRTHTGEKPFACDICGR | | |
| | | F5: QSSDLSR | KFAYHWYLKKHTKIHLRQ | | |
| | | (SEQ ID NO: 838) | KDAAR | | |
| | | F6: YHWYLKK (SEQ ID | | | |
| | | NO: 839) | | | |
| eZFP_ | GATGT | F1: RSANLAR (SEQ ID | AAMAERPFQCRICMRNFSR | 712 | 908 |
| 21 | ATATT | NO: 840) | SANLARHIRTHTGEKPFAC | | |
| | TGCGG | F2: RSDNLRE (SEQ ID | DICGRKFARSDNLREHTKIH | | |
| | GAG | NO: 841) | TGSQKPFQCRICMRNFSRPY | | |
| | (SEQ ID | F3: RPYTLRL | TLRLHIRTHTGEKPFACDIC | | |
| | NO: 1048) | (SEQ ID NO: 842) | GRKFAHRSNLNKHTKIHTG | | |
| | | F4: HRSNLNK (SEQ ID | SQKPFQCRICMRNFSQSGSL | | |
| | | NO: 843) | TRHIRTHTGEKPFACDICGR | | |
| | | F5: QSGSLTR | KFATSANLSRHTKIHLRQK | | |
| | | (SEQ ID NO: 844) | DAAR | | |
| | | F6: TSANLSR | | | |
| | | (SEQ ID NO: 845) | | | |
| eZFP_ | CAGCC | F1: RSDDLVR (SEQ ID | LEPGEKPYACPECGKSFSRS | 713 | 909 |
| 22 | AGTGG | NO: 846) | DDLVRHQRTHTGEKPYKCP | | |
| | GGGTT | F2: TSGSLVR | ECGKSFSTSGSLVRHQRTH | | |
| | GCG | (SEQ ID NO: 847) | TGEKPYKCPECGKSFSRSD | | |
| | (SEQ ID | F3: RSDKLVR (SEQ ID | KLVRHQRTHTGEKPYACPE | | |
| | NO: 1049) | NO: 848) | CGKSFSRSDELVRHQRTHT | | |
| | | F4: RSDELVR (SEQ ID | GEKPYKCPECGKSFSTSHSL | | |
| | | NO: 849) | TEHQRTHTGEKPYKCPECG | | |
| | | F5: TSHSLTE | KSFSRADNLTEHQRTHTGK | | |
| | | (SEQ ID NO: 850) | KTS | | |
| | | F6: RADNLTE (SEQ ID | | | |
| | | NO: 851) | | | |
| eZFP_ | GATGG | F1: ERSHLRE | LEPGEKPYACPECGKSFSER | 714 | 910 |
| 23 | CCCAT | (SEQ ID NO: 852) | SHLREHQRTHTGEKPYKCP | | |
| | GACCA | F2: TSHSLTE | ECGKSFSTSHSLTEHQRTHT | | |
| | AGC | (SEQ ID NO: 853) | GEKPYKCPECGKSFSQAGH | | |
| | (SEQ ID | F3: QAGHLAS (SEQ ID | LASHQRTHTGEKPYACPEC | | |
| | NO: 1050) | NO: 854) | GKSFSTSHSLTEHQRTHTGE | | |
| | | F4: TSHSLTE | KPYKCPECGKSFSDPGHLV | | |
| | | (SEQ ID NO: 855) | RHQRTHTGEKPYKCPECGK | | |
| | | F5: DPGHLVR (SEQ ID | SFSTSGNLVRHQRTHTGKK | | |
| | | NO: 856) | TS | | |
| | | F6: TSGNLVR (SEQ ID | | | |
| | | NO: 857) | | | |
| eZFP_ | GGGGT | F1: RADNLTE (SEQ ID | LEPGEKPYKCPECGKSFSRA | 715 | 911 |
| 24 | AAAG | NO: 858) | DNLTEHQRTHTGEKPYKCP | | |
| | GTTCA | F2: TSGSLVR | ECGKSFSTSGSLVRHQRTH | | |
| | GGTA | (SEQ ID NO: 859) | TGEKPYKCPECGKSFSRKD | | |
| | (SEQ ID | F3: RKDNLKN (SEQ ID | NLKNHQRTHTGEKPYKCPE | | |
| | NO: 1051) | NO: 860) | CGKSFSQSSSLVRHQRTHT | | |
| | | F4: QSSSLVR | GEKPYKCPECGKSFSRSDK | | |
| | | (SEQ ID NO: 861) | LVRHQRTHTGEKPYKCPEC | | |
| | | F5: RSDKLVR (SEQ ID | GKSFSDSGNLRVHQRTHTG | | |
| | | NO: 862) | KKTS | | |
| | | F6: DSGNLRV (SEQ ID | | | |
| | | NO: 863) | | | |
| eZFP_ | GCTAG | F1: QSSSLVR | LEPGEKPYACPECGKSFSQS | 716 | 912 |
| 25 | GAGTT | (SEQ ID NO: 864) | SSLVRHQRTHTGEKPYKCP | | |
| | CCGCA | F2: QSGDLRR (SEQ ID | ECGKSFSQSGDLRRHQRTH | | |
| | GTA | NO: 865) | TGEKPYKCPECGKSFSRSDE | | |
| | (SEQ ID | F3: RSDERKR (SEQ ID | RKRHQRTHTGEKPYACPEC | | |
| | NO: 1052) | NO: 866) | GKSFSHRTTLTNHQRTHTG | | |
| | | F4: HRTTLTN (SEQ ID | EKPYKCPECGKSFSRSDHLT | | |
| | | NO: 867) | NHQRTHTGEKPYKCPECGK | | |
| | | F5: RSDHLTN (SEQ ID | SFSTSGELVRHQRTHTGKK | | |
| | | NO: 868) | TS | | |
| | | F6: TSGELVR (SEQ ID | | | |
| | | NO: 869) | | | |
| eZFP_ | GCGGC | F1: QSGDLRR (SEQ ID | LEPGEKPYACPECGKSFSQS | 717 | 913 |
| 26 | TAGGA | NO: 870) | GDLRRHQRTHTGEKPYKCP | | |
| | GTTCC | F2: RSDERKR (SEQ ID | ECGKSFSRSDERKRHQRTH | | |
| | GCA | NO: 871) | TGEKPYKCPECGKSFSHRT | | |
| | (SEQ ID | F3: HRTTLTN (SEQ ID | TLTNHQRTHTGEKPYACPE | | |
| | NO: 1053) | NO: 872) | CGKSFSRSDHLTNHQRTHT | | |
| | | F4: RSDHLTN (SEQ ID | GEKPYKCPECGKSFSTSGEL | | |
| | | NO: 873) | VRHQRTHTGEKPYKCPECG | | |
| | | F5: TSGELVR (SEQ ID | KSFSRSDDLVRHQRTHTGK | | |
| | | NO: 874) | KTS | | |
| | | F6: RSDDLVR (SEQ ID | | | |
| | | NO: 875) | | | |
| eZFP_ | GTATG | F1: QRAHLER (SEQ ID | LEPGEKPYACPECGKSFSQR | 718 | 914 |
| 27 | GATCG | NO: 876) | AHLERHQRTHTGEKPYKCP | | |
| | GCAGA | F2: QLAHLRA (SEQ ID | ECGKSFSQLAHLRAHQRTH | | |
| | GGA | NO: 877) | TGEKPYKCPECGKSFSDPG | | |
| | (SEQ ID | F3: DPGHLVR (SEQ ID | HLVRHQRTHTGEKPYACPE | | |
| | NO: 1054) | NO: 878) | CGKSFSRRSACRRHQRTHT | | |
| | | F4: RRSACRR (SEQ ID | GEKPYKCPECGKSFSRSDH | | |
| | | NO: 879) | LTTHQRTHTGEKPYKCPEC | | |
| | | F5: RSDHLTT (SEQ ID | GKSFSQSSSLVRHQRTHTG | | |
| | | NO: 880) | KKTS | | |
| | | F6: QSSSLVR | | | |
| | | (SEQ ID NO: 881) | | | |
| eZFP_ | CCGAT | F1: QSSNLVR (SEQ ID | LEPGEKPYACPECGKSFSQS | 719 | 915 |
| 28 | CCATA | NO: 882) | SNLVRHQRTHTGEKPYKCP | | |
| | CTGCG | F2: RSDDLVR (SEQ ID | ECGKSFSRSDDLVRHQRTH | | |
| | GAA | NO: 883) | TGEKPYKCPECGKSFSTHL | | |
| | (SEQ ID | F3: THLDLIR | DLIRHQRTHTGEKPYACPE | | |
| | NO: 1055) | (SEQ ID NO: 884) | CGKSFSTSGNLTEHQRTHT | | |
| | | F4: TSGNLTE | GEKPYKCPECGKSFSRRSA | | |
| | | (SEQ ID NO: 885) | CRRHQRTHTGEKPYKCPEC | | |
| | | F5: RRSACRR (SEQ ID | GKSFSRNDTLTEHQRTHTG | | |
| | | NO: 886) | KKTS | | |
| | | F6: RNDTLTE (SEQ ID | | | |
| | | NO: 887) | | | |

TABLE E5
eZFP-KRAB fusion proteins

| SEQ | | |
|---|---|---|
| ID | | |
| NOS | Sequence | Description |
| 916 | ATGGCACCGAAGAAAAAACGCAAAGTTGGTCGAGTACCCGCTGCTATG | 3xFLAG-SV40 |
| | GCAGAGCGGCCATTTCAGTGTCGAATTTGCATGCGAAATTTCTCTAGCG | NLS--ZFP- |
| | AAGCGGATCGAAGTAGACATATCCGGACCCATACGGGTGAGAAACCGT | SV40-NLS- |
| | TCGCGTGTGATATATGCGGTCGCAAATTCGCAGACCGCTCCAACCTGAC | KRAB (DNA |
| | AAGGCACACAAAAATTCATACTGGAAGCCAGAAACCGTTTCAGTGCCG | Sequence) |
| | GATTTGTATGCGCAATTTCTCTCAATCCTCCGATCTCTCCCGCCACATCA | |
| | GGACTCATACCGGGGAGAAACCCTTTGCTTGTGACATTTGTGGCAGAAA | |
| | GTTTGCCTATCACTGGTACCTTAAGAAGCACACCAAGATCCATACTGGC | |
| | TCTCAAAAGCCTTTCCAATGCCGAATATGTATGCGAAACTTTTCTAGGT | |
| | CTGACTCCCTCTCTGTACATATCCGCACTCACACGGGTGAAAAACCATT | |
| | TGCCTGTGACATATGTGGCAGAAAATTTGCTCAAAATGCGAACCGAAA | |
| | AACGCATACGAAAATCCATTTGCGACAAAAAGATGCAGCTCGGGGCTC | |
| | CGGACCGAAAAAAAAGAGAAAGGTAAACGGCGGGGGAGGATCACGGA | |
| | CCCTGGTTACATTTAAGGACGTTTTTGTAGACTTCACGAGGGAGGAATG | |
| | GAAGCTGTTGGACACCGCCCAGCAAATCGTGTATCGAAATGTAATGTTG | |
| | GAAAATTATAAAAATCTGGTTTCCCTCGGCTACCAATTGACAAAACCAG | |
| | ACGTCATCCTCAGACTGGAAAAAGGGGAAGAACCTTGGCTTGTCTGA | |
| 917 | ATGGCACCGAAGAAAAAACGCAAAGTTGGTCGAGTACCCGCGGCAATG | 3xFLAG-SV40 |
| | GCAGAACGCCCGTTTCAGTGTAGAATCTGCATGCGCAATTTCTCCAGAA | NLS--ZFP- |
| | GTGACGTACTCAGCACGCATATCAGAACACATACTGGTGAAAAACCGTT | SV40-NLS- |
| | TGCTTGTGATATCTGTGGTAAGAAATTCGCGGATAACTCCTCAAGGACG | KRAB (DNA |
| | CGGCATACGAAGATCCACACTGGTTCTCAAAAGCCGTTCCAGTGCCGGA | Sequence) |
| | TATGCATGCGGAACTTTAGTCGGCCATATACGCTTCGACTTCATATTAG | |
| | GACTCACACCGGCGAAAAGCCGTTCGCCTGTGACATTTGCGGGAGAAA | |
| | ATTCGCTGACTCTAGTCACCGCACGAGGCACACTAAAATACATACTGGT | |
| | TCACAAAAACCATTCCAGTGCCGAATTTGCATGCGAAATTTTTCCCGAA | |
| | GTGACCATCTCTCACAGCACATCCGCACCCATACAGGGGAGAAGCCCTT | |
| | CGCTTGTGATATATGCGGACGCAAGTTCGCGGACAGCTCACACCGGACC | |
| | CGCCATACAAAGATCCACTTGAGACAGAAAGATGCAGCGCGGGGCTCC | |
| | GGACCGAAAAAAAAGAGAAAGGTAAACGGCGGGGGAGGATCACGGAC | |
| | CCTGGTTACATTTAAGGACGTTTTTGTAGACTTCACGAGGGAGGAATGG | |
| | AAGCTGTTGGACACCGCCCAGCAAATCGTGTATCGAAATGTAATGTTGG | |
| | AAAATTATAAAAATCTGGTTTCCCTCGGCTACCAATTGACAAAACCAGA | |
| | CGTCATCCTCAGACTGGAAAAAGGGGAAGAACCTTGGCTTGTCTGA | |
| 918 | ATGGCACCGAAGAAAAAACGCAAAGTTGGTCGAGTACCCGCCGCAATG | 3xFLAG-SV40 |
| | GCCGAAAGACCATTTCAGTGCAGGATATGTATGCGCAACTTCTCTCGCA | NLS--ZFP- |
| | GTGACCACCTGAGTCAACATATCAGGACACACACGGGTGAAAAGCCTT | SV40-NLS- |
| | TTGCATGCGATATTTGTGGTCGAAAATTTGCTCAGTCTGCGGACCGAAC | KRAB (DNA |
| | CAAGCACACTAAAATTCATACCGGCTCACAGAAACCGTTTCAATGCCGC | Sequence) |
| | ATCTGTATGAGGAATTTCTCTAGATCAGACCACTTGTCCCAACACATCC | |
| | GGACTCATACTGGAGAAAAGCCGTTTGCATGTGACATTTGTGGCAGGAA | |
| | GTTTGCTAGAAGGTCTGACCTTAAAAGGCACACAAAAATTCATACGGGT | |
| | TCCCAGAAACCATTTCAGTGCCGGATATGCATGCGGAACTTTTCACGAA | |
| | GCGACCACCTCTCCCGACATATTCGAACGCACACTGGTGAGAAGCCGTT | |
| | TGCTTGCGACATTTGCGGACGCAAGTTCGCTCAGAGCTCCGACTTGAGG | |
| | AGGCATACCAAGATTCATCTCCGGCAGAAAGATGCCGCGCGGGGCTCC | |
| | GGACCGAAAAAAAAGAGAAAGGTAAACGGCGGGGGAGGATCACGGAC | |
| | CCTGGTTACATTTAAGGACGTTTTTGTAGACTTCACGAGGGAGGAATGG | |
| | AAGCTGTTGGACACCGCCCAGCAAATCGTGTATCGAAATGTAATGTTGG | |
| | AAAATTATAAAAATCTGGTTTCCCTCGGCTACCAATTGACAAAACCAGA | |
| | CGTCATCCTCAGACTGGAAAAAGGGGAAGAACCTTGGCTTGTCTGA | |
| 919 | ATGGCACCGAAGAAAAAACGCAAAGTTGGTCGAGTACCCGCCGCGATG | 3xFLAG-SV40 |
| | GCTGAGAGACCATTTCAGTGTCGAATCTGCATGAGAAATTTTTCAAGGA | NLS--ZFP- |
| | GTGACAATCTGTCTGAGCACATACGAACACATACTGGGGAAAAACCCTT | SV40-NLS- |
| | TGCATGTGACATTTGTGGAAGAAAGTTTGCTACCAGCTCAAATCGCAAA | KRAB (DNA |
| | ACACATACAAAGATACATACCGGCTCCCAAAAGCCATTCCAGTGCCGC | Sequence) |
| | ATCTGCATGAGGAACTTTTCCGATCGCTCACATCTTACCCGCCACATAA | |
| | GAACTCACACAGGCGAAAAGCCCTTTGCCTGCGATATATGCGGACGGA | |
| | AGTTCGCCCGCTCCGACGCTTTGACCCAGCATACCAAAATCCATACTGG | |
| | GTCTCAAAAGCCATTTCAGTGCCGAATCTGTATGAGGAATTTCTCCGAC | |
| | AGGTCAGCATTGGCACGGCATATCCGCACCCATACCGGTGAGAAGCCTT | |
| | TTGCTTGCGATATCTGTGGACGAAAATTTGCCCGGAGGTTCACTCTCTCC | |
| | AAACACACAAAGATACATCTGCGCCAAAAGGATGCAGCCCGGGGCTCC | |
| | GGACCGAAAAAAAAGAGAAAGGTAAACGGCGGGGGAGGATCACGGAC | |
| | CCTGGTTACATTTAAGGACGTTTTTGTAGACTTCACGAGGGAGGAATGG | |
| | AAGCTGTTGGACACCGCCCAGCAAATCGTGTATCGAAATGTAATGTTGG | |
| | AAAATTATAAAAATCTGGTTTCCCTCGGCTACCAATTGACAAAACCAGA | |
| | CGTCATCCTCAGACTGGAAAAAGGGGAAGAACCTTGGCTTGTCTGA | |
| 920 | ATGGCACCGAAGAAAAAACGCAAAGTTGGTCGAGTACCCGCCGCAATG | 3xFLAG-SV40 |
| | GCTGAGCGCCCGTTCCAGTGCAGAATATGCATGCGGAATTTTTCTAGGT | NLS--ZFP- |
| | CAGATCATTTGTCTGAGCATATTCGCACACACACGGGAGAGAAGCCCTT | SV40-NLS- |
| | TGCTTGCGATATATGTGGAAGGAAATTCGCGCAATACAGTGGGCGCTAC | KRAB (DNA |
| | TACCATACAAAGATCCATACGGGCTCCCAGAAGCCCTTCCAATGTCGAA | Sequence) |
| | TATGTATGAGGAATTTTAGTCACGGACAAACATTGAATGAACATATACG | |
| | CACTCACACTGGTGAAAAACCATTTGCGTGCGATATTTGCGGAAGGAAG | |
| | TTTGCTCAGTCTGGGAATTTGGCGCGACACACCAAGATCCACACAGGAT | |
| | CCCAGAAACCATTTCAGTGCAGAATTTGTATGAGAAACTTTAGCCGCAG | |
| | TGACAGTCTCTTGAGGCACATACGGACTCATACTGGGGAGAAACCATTC | |
| | GCCTGCGATATTTGTGGACGAAAGTTCGCCTGTCGCGAGTACAGAGGCA | |
| | AGCACACTAAGATACATCTTAGGCAAAAGGACGCTGCACGGGGCTCCG | |
| | GACCGAAAAAAAAGAGAAAGGTAAACGGCGGGGGAGGATCACGGACC | |
| | CTGGTTACATTTAAGGACGTTTTTGTAGACTTCACGAGGGAGGAATGGA | |
| | AGCTGTTGGACACCGCCCAGCAAATCGTGTATCGAAATGTAATGTTGGA | |
| | AAATTATAAAAATCTGGTTTCCCTCGGCTACCAATTGACAAAACCAGAC | |
| | GTCATCCTCAGACTGGAAAAAGGGGAAGAACCTTGGCTTGTCTGA | |
| 921 | ATGGCACCGAAGAAAAAACGCAAAGTTGGTCGAGTACCCGCCGCGATG | 3xFLAG-SV40 |
| | GCTGAGAGGCCTTTTCAATGTCGAATCTGTATGAGGAACTTCTCTCAAT | NLS--ZFP- |
| | CTGCTAATCGCACGACGCACATTCGAACGCATACCGGTGAGAAGCCATT | SV40-NLS- |
| | CGCGTGCGATATCTGCGGACGGAAATTCGCGAGGTCAGCTAATCTTACA | KRAB (DNA |
| | CGGCACACGAAGATCCACACAGGGTCACAGAAACCTTTTCAGTGTCGC | Sequence) |
| | ATTTGCATGAGGAATTTCTCCCGATCTGACGTCCTTAGCGAACATATAC | |
| | GAACTCACACGGGCGAGAAGCCATTTGCGTGCGATATATGCGGGAGGA | |
| | AGTTTGCCACCTCTGGACATCTGAGTCGACATACCAAAATTCATACCGG | |
| | TAGTCAGAAGCCGTTCCAATGCAGAATATGTATGCGAAATTTCTCTCAA | |
| | AGCTCAGACTTGTCTAGGCACATAAGAACGCACACGGGTGAAAAACCT | |
| | TTCGCGTGTGATATCTGCGGCAGAAAGTTCGCACAATGGTCCACCCGAA | |
| | AGCGGCATACGAAGATTCACCTCAGACAGAAAGACGCTGCCCGGGGCT | |
| | CCGGACCGAAAAAAAAGAGAAAGGTAAACGGCGGGGGAGGATCACGG | |
| | ACCCTGGTTACATTTAAGGACGTTTTTGTAGACTTCACGAGGGAGGAAT | |
| | GGAAGCTGTTGGACACCGCCCAGCAAATCGTGTATCGAAATGTAATGTT | |
| | GGAAAATTATAAAAATCTGGTTTCCCTCGGCTACCAATTGACAAAACCA | |
| | GACGTCATCCTCAGACTGGAAAAAGGGGAAGAACCTTGGCTTGTCTGA | |
| 922 | ATGGCACCGAAGAAAAAACGCAAAGTTGGTCGAGTACCCGCGGCGATG | 3xFLAG-SV40 |
| | GCAGAACGCCCGTTCCAATGCAGAATATGTATGAGAAACTTCTCCCAGA | NLS--ZFP- |
| | GCGGAAATCTGGCACGCCACATCCGGACACACACGGGAGAGAAGCCAT | SV40-NLS- |
| | TTGCTTGTGACATTTGTGGTCGCAAATTTGCCGCCACCTGTTGTCTGGCA | KRAB (DNA |
| | CATCATACTAAGATACATACGGGGTCACAGAAACCATTCCAATGTAGG | Sequence) |
| | ATCTGCATGCGGAATTTTTCTCGGTGGCAGTATTTGCCTACGCATATTAG | |
| | AACCCACGCCGGTGAGAAACCGTTTGCATGTGACATCTGCGGACGAAA | |
| | GTTTGCCGATAGATCTGCGCTTGCTAGGCATACTAAAATCCACACGGGG | |
| | TCCCAGAAGCCTTTTCAGTGTCGGATATGTATGAGGAACTTCAGTCGAT | |
| | CAGACAACCTTAGCGAGCATATTCGGACGCATACTGGAGAAAAACCTTT | |
| | TGCTTGTGATATATGCGGTAGGAAGTTCGCCAAACGGTGTAACCTTCGC | |
| | TGTCACACCAAAATACATCTTCGCCAGAAAGATGCGGCCCGGGGCTCCG | |
| | GACCGAAAAAAAAGAGAAAGGTAAACGGCGGGGGAGGATCACGGACC | |
| | CTGGTTACATTTAAGGACGTTTTTGTAGACTTCACGAGGGAGGAATGGA | |
| | AGCTGTTGGACACCGCCCAGCAAATCGTGTATCGAAATGTAATGTTGGA | |
| | AAATTATAAAAATCTGGTTTCCCTCGGCTACCAATTGACAAAACCAGAC | |
| | GTCATCCTCAGACTGGAAAAAGGGGAAGAACCTTGGCTTGTCTGA | |
| 923 | ATGGCACCGAAGAAAAAACGCAAAGTTGGTCGAGTACCCGCCGCTATG | 3xFLAG-SV40 |
| | GCTGAAAGACCATTCCAGTGCAGAATATGTATGAGGAATTTTTCTAATC | NLS--ZFP- |
| | CCGCGAACCTTACGCGCCATATCAGGACGCACACGGGCGAAAAGCCCT | SV40-NLS- |
| | TCGCCTGCGACATTTGTGGGAGAAAGTTTGCTCAAAACGCGACCAGGAC | KRAB (DNA |
| | AAAGCACACGAAAATTCACACTGGTAGCCAGAAGCCGTTCCAGTGTAG | Sequence) |
| | GATCTGTATGCGCAATTTCTCTCAGTCCGGGCACCTCGCGCGACACATA | |
| | AGAACTCATACGGGGGAGAAGCCGTTTGCATGTGACATCTGCGGCCGC | |
| | AAGTTTGCGAATAGGCATGACAGGGCAAAACATACGAAGATCCATACA | |
| | GGTTCTCAAAAACCTTTCCAATGTCGAATATGCATGCGCAACTTTAGTC | |
| | GGTCAGACCACCTTTCTGAACACATCAGGACACACACTGGCGAAAAGC | |
| | CGTTCGCATGTGACATTTGCGGCAGAAAGTTCGCACAAAGACGGTCCCG | |
| | CTATAAGCACACCAAAATTCACCTTAGGCAAAAGGATGCAGCTCGGGG | |
| | CTCCGGACCGAAAAAAAAGAGAAAGGTAAACGGCGGGGGAGGATCAC | |
| | GGACCCTGGTTACATTTAAGGACGTTTTTGTAGACTTCACGAGGGAGGA | |
| | ATGGAAGCTGTTGGACACCGCCCAGCAAATCGTGTATCGAAATGTAATG | |
| | TTGGAAAATTATAAAAATCTGGTTTCCCTCGGCTACCAATTGACAAAAC | |
| | CAGACGTCATCCTCAGACTGGAAAAAGGGGAAGAACCTTGGCTTGTCT | |
| | GA | |
| 924 | ATGGCACCGAAGAAAAAACGCAAAGTTGGTCGAGTACCCGCGGCAATG | 3xFLAG-SV40 |
| | GCAGAACGACCCTTCCAATGCCGCATATGTATGCGAAACTTCAGCCAGA | NLS--ZFP- |
| | GCTCAGATCTTTCCAGACACATCAGGACTCACACTGGCGAAAAACCATT | SV40-NLS- |
| | TGCATGCGATATATGCGGGAGAAAATTCGCGCACCGCAGTACGCGAAA | KRAB (DNA |
| | CAGGCATACAAAGATACATACTGGCAGTCAAAAGCCATTTCAATGTCG | Sequence) |
| | AATATGCATGAGGAACTTTAGTCGATCTGACGTGCTGAGCGCTCACATA | |
| | CGGACCCATACCGGAGAGAAACCATTCGCTTGTGACATCTGTGGTAGGA | |
| | AGTTCGCGGATTCCCGGACCCGCAAAAATCATACTAAAATTCACACTGG | |
| | GTCTCAGAAGCCCTTTCAGTGTAGGATATGTATGCGCAATTTTAGCCAG | |
| | AGTGGTTCATTGACTCGGCATATCAGAACACATACTGGAGAGAAACCTT | |
| | TCGCGTGTGATATTTGCGGTCGAAAGTTCGCAGATCAGAGTGGACTTGC | |
| | GCACCATACTAAGATCCACCTGAGACAGAAGGACGCTGCGCGGGGCTC | |
| | CGGACCGAAAAAAAAGAGAAAGGTAAACGGCGGGGGAGGATCACGGA | |
| | CCCTGGTTACATTTAAGGACGTTTTTGTAGACTTCACGAGGGAGGAATG | |
| | GAAGCTGTTGGACACCGCCCAGCAAATCGTGTATCGAAATGTAATGTTG | |
| | GAAAATTATAAAAATCTGGTTTCCCTCGGCTACCAATTGACAAAACCAG | |
| | ACGTCATCCTCAGACTGGAAAAAGGGGAAGAACCTTGGCTTGTCTGA | |
| 925 | ATGGCACCGAAGAAAAAACGCAAAGTTGGTCGAGTACCCGCTGCCATG | 3xFLAG-SV40 |
| | GCGGAGCGCCCTTTCCAGTGTAGGATATGTATGCGCAACTTCAGTCAGA | NLS--ZFP- |
| | ACCCAGCCCAGTGGCGGCACATACGGACGCATACTGGAGAAAAGCCAT | SV40-NLS- |
| | TTGCATGTGATATCTGCGGGCGAAAATTCGCGCGGTCAGCAGATTTGAG | KRAB (DNA |
| | CCGGCATACGAAGATCCATACAGGTTCACAAAAGCCATTTCAATGTCGG | Sequence) |
| | ATATGTATGCGGAACTTCAGCACGTCCGGCTCATTGTCAAGACATATAC | |
| | GAACTCATACCGGAGAGAAACCCTTCGCGTGCGACATTTGCGGTCGGA | |
| | AGTTCGCGCGATCCGACCATCTGTCACGACATACGAAAATACACACTGG | |
| | CTCTCAAAAGCCGTTTCAGTGCAGAATTTGCATGAGAAATTTTAGCAGG | |
| | AGCGACTCACTCCTTCGGCATATACGAACACACACTGGTGAGAAGCCAT | |
| | TTGCCTGTGATATTTGTGGACGAAAGTTTGCGCAATCTTACGATAGGTTT | |
| | CAGCATACAAAAATCCACCTTCGGCAAAAGGACGCGGCACGGGGCTCC | |
| | GGACCGAAAAAAAAGAGAAAGGTAAACGGCGGGGGAGGATCACGGAC | |
| | CCTGGTTACATTTAAGGACGTTTTTGTAGACTTCACGAGGGAGGAATGG | |
| | AAGCTGTTGGACACCGCCCAGCAAATCGTGTATCGAAATGTAATGTTGG | |
| | AAAATTATAAAAATCTGGTTTCCCTCGGCTACCAATTGACAAAACCAGA | |
| | CGTCATCCTCAGACTGGAAAAAGGGGAAGAACCTTGGCTTGTCTGA | |
| 926 | ATGGCACCGAAGAAAAAACGCAAAGTTGGTCGAGTACCCGCTGCCATG | 3xFLAG-SV40 |
| | GCTGAACGACCGTTTCAATGTCGAATTTGCATGCGCAACTTCTCCACGT | NLS--ZFP- |
| | CCGGGTCTCTCAGTAGACACATCAGAACGCATACTGGTGAAAAACCATT | SV40-NLS- |
| | CGCTTGTGACATATGCGGCCGAAAATTCGCGCGGAGCGACCACCTGTCA | KRAB (DNA |
| | CGGCATACCAAAATTCACACCGGGAGTCAAAAACCGTTCCAGTGTAGG | Sequence) |
| | ATATGTATGCGCAACTTCAGCCGGTCTGACAGTCTGCTTCGACATATTC | |
| | GGACGCACACTGGTGAAAAGCCGTTTGCGTGCGACATTTGTGGTCGAAA | |
| | GTTCGCTCAATCTTATGATAGGTTTCAACACACCAAAATACATACGGGC | |
| | TCCCAGAAGCCGTTCCAGTGCAGAATATGCATGAGAAATTTCTCTCGCA | |
| | GTGACAATTTGTCCACCCATATTCGAACGCACACCGGCGAGAAACCCTT | |
| | CGCCTGCGATATTTGCGGTCGCAAGTTCGCAGACAACAGGGATAGGAT | |
| | AAAACATACGAAGATCCATCTGAGGCAAAAAGACGCCGCCCGGGGCTC | |
| | CGGACCGAAAAAAAAGAGAAAGGTAAACGGCGGGGGAGGATCACGGA | |
| | CCCTGGTTACATTTAAGGACGTTTTTGTAGACTTCACGAGGGAGGAATG | |
| | GAAGCTGTTGGACACCGCCCAGCAAATCGTGTATCGAAATGTAATGTTG | |
| | GAAAATTATAAAAATCTGGTTTCCCTCGGCTACCAATTGACAAAACCAG | |
| | ACGTCATCCTCAGACTGGAAAAAGGGGAAGAACCTTGGCTTGTCTGA | |
| 927 | ATGGCACCGAAGAAAAAACGCAAAGTTGGTCGAGTACCCGCAGCCATG | 3xFLAG-SV40 |
| | GCAGAGCGGCCATTCCAGTGCAGAATCTGCATGCGGAACTTTTCCGATA | NLS--ZFP- |
| | GGTCCAATCTGTCACGCCATATTAGGACACACACGGGTGAAAAACCGTT | SV40-NLS- |
| | CGCGTGTGACATATGCGGTCGCAAATTCGCCCTGAGACAGAACCTGATT | KRAB (DNA |
| | ATGCACACAAAAATACATACGGGAAGCCAGAAACCGTTCCAGTGTCGG | Sequence) |
| | ATATGCATGAGGAACTTCAGTGAGAGGGGGACTTTGGCGAGGCACATC | |
| | AGGACTCACACTGGGGAGAAGCCCTTTGCATGTGATATCTGTGGCCGAA | |
| | AATTTGCTCGATCAGATGCTCTCACCCAACATACAAAGATCCATACTGG | |
| | CTCTCAAAAACCGTTTCAATGTAGAATTTGTATGCGCAACTTCTCTCGGT | |
| | CAGATAGCCTGTCCCAGCATATCCGAACTCATACAGGTGAGAAACCCTT | |
| | CGCATGCGACATCTGTGGGCGAAAATTTGCTAGAAAAGCAGACCGGAC | |
| | CCGACACACAAAGATTCATCTGCGACAAAAAGACGCCGCCCGGGGCTC | |
| | CGGACCGAAAAAAAAGAGAAAGGTAAACGGCGGGGGAGGATCACGGA | |
| | CCCTGGTTACATTTAAGGACGTTTTTGTAGACTTCACGAGGGAGGAATG | |
| | GAAGCTGTTGGACACCGCCCAGCAAATCGTGTATCGAAATGTAATGTTG | |
| | GAAAATTATAAAAATCTGGTTTCCCTCGGCTACCAATTGACAAAACCAG | |
| | ACGTCATCCTCAGACTGGAAAAAGGGGAAGAACCTTGGCTTGTCTGA | |
| 928 | ATGGCACCGAAGAAAAAACGCAAAGTTGGTCGAGTACCCGCGGCCATG | 3xFLAG-SV40 |
| | GCTGAGAGGCCTTTTCAATGTAGAATATGTATGCGAAATTTTTCACAGT | NLS--ZFP- |
| | ACTGTTGTCTCACGAACCACATAAGGACTCATACAGGGGAGAAACCATT | SV40-NLS- |
| | TGCCTGTGACATTTGCGGTCGCAAATTTGCTACTTCTGGAAACCTGACTC | KRAB (DNA |
| | GGCACACTAAGATTCACACAGGGTCCCAGAAGCCCTTCCAGTGTCGCAT | Sequence) |
| | TTGCATGAGGAATTTTAGTCAAAGCTCTGACTTGTCAAGGCATATTCGC | |
| | ACGCACACGGGCGAAAAGCCGTTCGCTTGCGACATATGCGGGCGGAAA | |
| | TTTGCCTTCCGCTATTATTTGAAGAGACACACCAAGATACATACGGGCT | |
| | CTCAGAAGCCCTTTCAGTGTAGGATTTGCATGCGCAATTTTTCACAATCT | |
| | GGTGATCTCACGCGACACATCCGGACTCACACAGGTGAAAAGCCTTTCG | |
| | CGTGCGACATTTGCGGCCGGAAGTTTGCTGACAAGGGCAACCTCACAA | |
| | AGCATACGAAGATTCACTTGAGGCAGAAAGATGCTGCTCGGGGCTCCG | |
| | GACCGAAAAAAAAGAGAAAGGTAAACGGCGGGGGAGGATCACGGACC | |
| | CTGGTTACATTTAAGGACGTTTTTGTAGACTTCACGAGGGAGGAATGGA | |
| | AGCTGTTGGACACCGCCCAGCAAATCGTGTATCGAAATGTAATGTTGGA | |
| | AAATTATAAAAATCTGGTTTCCCTCGGCTACCAATTGACAAAACCAGAC | |
| | GTCATCCTCAGACTGGAAAAAGGGGAAGAACCTTGGCTTGTCTGA | |
| 929 | ATGGCACCGAAGAAAAAACGCAAAGTTGGTCGAGTACCCGCCGCCATG | 3xFLAG-SV40 |
| | GCCGAACGACCATTCCAGTGCAGGATATGTATGCGCAATTTTTCAACCA | NLS--ZFP- |
| | GTGGTTCATTGTCACGACATATTAGAACACACACCGGTGAGAAACCCTT | SV40-NLS- |
| | TGCGTGTGACATCTGTGGGAGGAAATTCGCAAGATCTGACAACCTTACG | KRAB (DNA |
| | ACACATACAAAGATTCACACAGGCTCTCAAAAGCCCTTCCAGTGCCGAA | Sequence) |
| | TTTGCATGCGAAACTTTTCCCAGTCTGGTAATCTCGCTCGACATATCAGA | |
| | ACCCACACGGGGGAAAAACCATTCGCTTGTGATATTTGCGGACGAAAG | |
| | TTCGCCGACAGAACCACACTCATGAGACACACTAAAATCCATACTGGTA | |
| | GTCAGAAGCCGTTTCAGTGTAGAATCTGCATGAGGAACTTTTCCCAGTC | |
| | AGGCCACCTTGCAAGACATATACGAACTCACACTGGAGAAAAGCCGTT | |
| | CGCCTGTGACATTTGTGGGCGCAAGTTCGCGCAACTCACCCATCTGAAT | |
| | AGCCATACGAAGATTCACTTGAGACAGAAAGATGCGGCTCGGGGCTCC | |
| | GGACCGAAAAAAAAGAGAAAGGTAAACGGCGGGGGAGGATCACGGAC | |
| | CCTGGTTACATTTAAGGACGTTTTTGTAGACTTCACGAGGGAGGAATGG | |
| | AAGCTGTTGGACACCGCCCAGCAAATCGTGTATCGAAATGTAATGTTGG | |
| | AAAATTATAAAAATCTGGTTTCCCTCGGCTACCAATTGACAAAACCAGA | |
| | CGTCATCCTCAGACTGGAAAAAGGGGAAGAACCTTGGCTTGTCTGA | |
| 930 | ATGGCACCGAAGAAAAAACGCAAAGTTGGTCGAGTACCCGCAGCTATG | 3xFLAG-SV40 |
| | GCTGAACGCCCATTCCAGTGTCGGATCTGCATGCGCAACTTTTCTATAA | NLS--ZFP- |
| | AACACGATCTTCACCGACACATTCGGACACATACTGGGGAGAAGCCCTT | SV40-NLS- |
| | TGCGTGTGACATCTGTGGCCGAAAGTTCGCTAGATCCGCAAACTTGACT | KRAB (DNA |
| | CGGCATACGAAAATTCACACTGGAAGCCAGAAACCTTTCCAATGTCGA | Sequence) |
| | ATCTGTATGAGGAACTTTAGCAGAAGTGATAATCTCGCCAGGCATATCC | |
| | GAACGCACACAGGCGAGAAGCCATTCGCATGTGATATTTGTGGTAGAA | |
| | AGTTCGCCCAAAATGTCTCTCGCCCACGCCATACTAAGATCCACACGGG | |
| | CTCCCAGAAGCCGTTCCAATGCCGCATTTGCATGCGAAACTTTTCCAGA | |
| | TCAGACGATCTGAGCAAGCATATTAGGACGCATACAGGGGAGAAGCCT | |
| | TTTGCTTGCGACATTTGCGGCCGGAAATTTGCTGACTCAAGTCACAGAA | |
| | CACGGCATACCAAGATACACCTTCGACAAAAAGATGCCGCACGGGGCT | |
| | CCGGACCGAAAAAAAAGAGAAAGGTAAACGGCGGGGGAGGATCACGG | |
| | ACCCTGGTTACATTTAAGGACGTTTTTGTAGACTTCACGAGGGAGGAAT | |
| | GGAAGCTGTTGGACACCGCCCAGCAAATCGTGTATCGAAATGTAATGTT | |
| | GGAAAATTATAAAAATCTGGTTTCCCTCGGCTACCAATTGACAAAACCA | |
| | GACGTCATCCTCAGACTGGAAAAAGGGGAAGAACCTTGGCTTGTCTGA | |
| 931 | ATGGCACCGAAGAAAAAACGCAAAGTTGGTCGAGTACCCGCGGCCATG | 3xFLAG-SV40 |
| | GCGGAACGACCCTTTCAGTGCCGAATTTGCATGAGGAACTTTTCACGAT | NLS--ZFP- |
| | CTGATAACCTGGCGAGGCACATCCGAACACATACGGGCGAGAAGCCAT | SV40-NLS- |
| | TCGCATGTGATATCTGCGGGCGAAAGTTCGCCCAAAATGTCAGTAGACC | KRAB (DNA |
| | GCGACATACTAAAATACACACTGGCTCACAGAAGCCGTTCCAATGCCGC | Sequence) |
| | ATCTGTATGCGCAATTTTTCCCGAAGCGACGATCTGTCTAAACATATTC | |
| | GGACGCACACTGGGGAAAAGCCTTTCGCTTGTGACATCTGTGGGAGGA | |
| | AGTTCGCTGACAGCTCTCATAGGACACGCCATACTAAGATTCATACCGG | |
| | AAGCCAGAAGCCTTTCCAGTGTCGGATTTGCATGAGAAACTTTAGCACT | |
| | TCTAGCAACAGAAAGACACATATACGAACCCATACGGGTGAGAAACCG | |
| | TTCGCATGCGATATCTGTGGGCGAAAATTTGCAGCCCAATGGACCAGAG | |
| | CTTGCCATACCAAGATACACCTTCGGCAGAAGGACGCTGCACGGGGCTC | |
| | CGGACCGAAAAAAAAGAGAAAGGTAAACGGCGGGGGAGGATCACGGA | |
| | CCCTGGTTACATTTAAGGACGTTTTTGTAGACTTCACGAGGGAGGAATG | |
| | GAAGCTGTTGGACACCGCCCAGCAAATCGTGTATCGAAATGTAATGTTG | |
| | GAAAATTATAAAAATCTGGTTTCCCTCGGCTACCAATTGACAAAACCAG | |
| | ACGTCATCCTCAGACTGGAAAAAGGGGAAGAACCTTGGCTTGTCTGA | |
| 932 | ATGGCACCGAAGAAAAAACGCAAAGTTGGTCGAGTACCCGCTGCGATG | 3xFLAG-SV40 |
| | GCAGAACGACCTTTTCAATGCCGAATTTGTATGAGGAACTTTTCCCGGT | NLS--ZFP- |
| | CAGACGACCTTTCCAAGCACATCAGAACTCATACCGGAGAAAAACCGT | SV40-NLS- |
| | TCGCCTGTGACATTTGTGGACGGAAGTTTGCTGACTCCTCTCACAGGAC | KRAB (DNA |
| | TCGCCACACTAAGATACACACCGGAAGTCAGAAGCCCTTCCAATGTAG | Sequence) |
| | GATATGCATGAGAAACTTCAGTACGTCATCAAACCGAAAAACGCATAT | |
| | CAGGACACATACCGGCGAAAAGCCGTTTGCATGTGATATCTGCGGCAG | |
| | GAAATTTGCAGCTCAGTGGACACGGGCATGTCACACAAAAATCCATAC | |
| | CGGTAGTCAAAAACCGTTTCAGTGTCGAATCTGCATGAGGAACTTTAGC | |
| | CGGAAGCAGACGAGAACCACGCATATAAGAACTCACACAGGTGAGAAA | |
| | CCCTTTGCGTGCGATATCTGCGGTCGCAAATTTGCTCACCGATCCTCCCT | |
| | GAGGCGACATACTAAAATACATCTGCGACAGAAAGACGCGGCTCGGGG | |
| | CTCCGGACCGAAAAAAAAGAGAAAGGTAAACGGCGGGGGAGGATCAC | |
| | GGACCCTGGTTACATTTAAGGACGTTTTTGTAGACTTCACGAGGGAGGA | |
| | ATGGAAGCTGTTGGACACCGCCCAGCAAATCGTGTATCGAAATGTAATG | |
| | TTGGAAAATTATAAAAATCTGGTTTCCCTCGGCTACCAATTGACAAAAC | |
| | CAGACGTCATCCTCAGACTGGAAAAAGGGGAAGAACCTTGGCTTGTCT | |
| | GA | |
| 933 | ATGGCACCGAAGAAAAAACGCAAAGTTGGTCGAGTACCCGCCGCCATG | 3xFLAG-SV40 |
| | GCAGAACGGCCTTTTCAGTGTCGGATCTGCATGAGAAACTTTAGTCAGA | NLS--ZFP- |
| | GTGCCCATCGCAAGAATCATATTCGAACTCATACCGGTGAAAAACCGTT | SV40-NLS- |
| | CGCGTGCGACATCTGTGGTCGAAAGTTTGCCACATCATCCAATAGAAAA | KRAB (DNA |
| | ACGCATACTAAGATTCATACCGGTAGCCAGAAACCATTCCAATGTAGAA | Sequence) |
| | TCTGCATGCGAAATTTCAGCAGGAGTGACAATTTGTCCGCACATATACG | |
| | GACACACACGGGCGAAAAACCCTTTGCTTGCGATATATGCGGTAGAAA | |
| | GTTCGCTAGGAACAACGACCGAAAAACACACACGAAGATTCATACAGG | |
| | TAGTCAGAAGCCATTTCAATGTCGGATCTGTATGCGAAATTTCTCTACTT | |
| | CTGGCAGCCTGTCCCGGCACATCAGAACACATACCGGTGAGAAGCCATT | |
| | TGCATGTGACATATGTGGGAGAAAATTTGCCCAGGCGGGTCACCTTGCG | |
| | AAGCATACAAAGATCCACCTCCGCCAGAAGGACGCCGCACGGGGCTCC | |
| | GGACCGAAAAAAAAGAGAAAGGTAAACGGCGGGGGAGGATCACGGAC | |
| | CCTGGTTACATTTAAGGACGTTTTTGTAGACTTCACGAGGGAGGAATGG | |
| | AAGCTGTTGGACACCGCCCAGCAAATCGTGTATCGAAATGTAATGTTGG | |
| | AAAATTATAAAAATCTGGTTTCCCTCGGCTACCAATTGACAAAACCAGA | |
| | CGTCATCCTCAGACTGGAAAAAGGGGAAGAACCTTGGCTTGTCTGA | |
| 934 | ATGGCACCGAAGAAAAAACGCAAAGTTGGTCGAGTACCCGCGGCTATG | 3xFLAG-SV40 |
| | GCAGAGCGGCCATTCCAATGTAGGATATGTATGAGGAACTTCTCCCGGA | NLS--ZFP- |
| | GCGATCACCTGTCCCAACACATCCGCACGCATACGGGTGAGAAGCCGTT | SV40-NLS- |
| | TGCTTGTGATATCTGCGGAAGAAAATTTGCAGCATCCAGTACACGCACA | KRAB (DNA |
| | AAGCATACGAAGATTCATACGGGATCCCAAAAGCCCTTTCAATGCAGG | Sequence) |
| | ATTTGTATGAGGAACTTCAGTCGGTCCGACGATCTGACACGACATATTA | |
| | GAACTCATACTGGAGAGAAGCCATTCGCATGTGACATCTGCGGTAGGA | |
| | AGTTCGCGCAGAAATCTAACCTGTCATCTCACACCAAGATACATACAGG | |
| | CTCACAGAAGCCGTTTCAATGCCGCATCTGCATGAGGAATTTCAGCCAG | |
| | TCCGCAAACAGAACTACGCATATTCGGACGCATACCGGCGAGAAGCCG | |
| | TTTGCCTGCGACATTTGCGGGAGGAAATTCGCACAGAACGCGACCAGA | |
| | ACCAAACACACCAAAATCCATCTTAGGCAAAAGGATGCGGCCCGGGGC | |
| | TCCGGACCGAAAAAAAAGAGAAAGGTAAACGGCGGGGGAGGATCACG | |
| | GACCCTGGTTACATTTAAGGACGTTTTTGTAGACTTCACGAGGGAGGAA | |
| | TGGAAGCTGTTGGACACCGCCCAGCAAATCGTGTATCGAAATGTAATGT | |
| | TGGAAAATTATAAAAATCTGGTTTCCCTCGGCTACCAATTGACAAAACC | |
| | AGACGTCATCCTCAGACTGGAAAAAGGGGAAGAACCTTGGCTTGTCTG | |
| | A | |
| 935 | ATGGCACCGAAGAAAAAACGCAAAGTTGGTCGAGTACCCGCGGCCATG | 3xFLAG-SV40 |
| | GCAGAACGACCCTTTCAGTGCCGAATTTGCATGCGGAACTTTAGTCGCA | NLS--ZFP- |
| | GTGACACCCTGAGCGAGCATATTCGCACGCATACGGGAGAGAAGCCAT | SV40-NLS- |
| | TTGCATGCGACATCTGCGGTAGAAAGTTTGCGAGGCGCTGGACGTTGGT | KRAB (DNA |
| | AGGCCACACGAAAATCCATACAGGCTCCCAGAAACCCTTCCAGTGCAG | Sequence) |
| | AATTTGTATGCGCAATTTTAGTGACAGAAGTAACTTGTCCCGACATATA | |
| | AGGACGCACACCGGCGAAAAACCGTTTGCCTGTGATATCTGTGGTCGGA | |
| | AATTCGCCCAGTCCGGTGACTTGACACGGCATACCAAAATACACACTGG | |
| | AAGCCAAAAGCCTTTTCAGTGTCGCATATGTATGCGCAACTTCAGCCAG | |
| | AGTAGTGACCTTTCACGGCATATACGGACGCATACGGGTGAGAAACCCT | |
| | TCGCCTGTGACATTTGCGGGCGAAAGTTTGCATATCATTGGTACCTGAA | |
| | AAAACATACGAAAATACATTTGAGACAAAAAGATGCAGCCCGGGGCTC | |
| | CGGACCGAAAAAAAAGAGAAAGGTAAACGGCGGGGGAGGATCACGGA | |
| | CCCTGGTTACATTTAAGGACGTTTTTGTAGACTTCACGAGGGAGGAATG | |
| | GAAGCTGTTGGACACCGCCCAGCAAATCGTGTATCGAAATGTAATGTTG | |
| | GAAAATTATAAAAATCTGGTTTCCCTCGGCTACCAATTGACAAAACCAG | |
| | ACGTCATCCTCAGACTGGAAAAAGGGGAAGAACCTTGGCTTGTCTGA | |
| 936 | ATGGCACCGAAGAAAAAACGCAAAGTTGGTCGAGTACCCGCTGCCATG | 3xFLAG-SV40 |
| | GCCGAGCGCCCGTTTCAATGCAGAATATGTATGAGGAACTTCTCTAGAA | NLS--ZFP- |
| | GCGCCAATCTTGCGCGACACATTAGAACTCACACAGGCGAGAAACCTTT | SV40-NLS- |
| | CGCCTGTGACATCTGCGGCAGAAAATTTGCGCGAAGTGATAACTTGCGC | KRAB (DNA |
| | GAGCACACAAAAATCCATACCGGTTCCCAAAAGCCCTTTCAATGTAGGA | Sequence) |
| | TTTGCATGAGGAACTTTTCAAGACCATACACGCTGAGACTCCACATTCG | |
| | CACGCATACGGGAGAAAAACCATTTGCTTGTGACATATGCGGCCGAAA | |
| | GTTTGCACACCGATCCAACTTGAATAAGCATACCAAAATCCATACGGGG | |
| | TCTCAGAAACCCTTCCAGTGTCGGATTTGTATGCGAAACTTCTCTCAGA | |
| | GTGGTTCTCTTACGCGCCACATTAGAACCCACACGGGGGAAAAGCCATT | |
| | CGCGTGCGATATCTGTGGCCGGAAATTTGCTACTTCCGCAAATCTTTCTC | |
| | GACATACAAAGATACATCTTAGACAGAAGGATGCGGCACGGGGCTCCG | |
| | GACCGAAAAAAAAGAGAAAGGTAAACGGCGGGGGAGGATCACGGACC | |
| | CTGGTTACATTTAAGGACGTTTTTGTAGACTTCACGAGGGAGGAATGGA | |
| | AGCTGTTGGACACCGCCCAGCAAATCGTGTATCGAAATGTAATGTTGGA | |
| | AAATTATAAAAATCTGGTTTCCCTCGGCTACCAATTGACAAAACCAGAC | |
| | GTCATCCTCAGACTGGAAAAAGGGGAAGAACCTTGGCTTGTCTGA | |
| 937 | ATGGCACCGAAGAAAAAACGCAAAGTTGGTCGAGTACCCTTGGAGCCC | 3xFLAG-SV40 |
| | GGTGAAAAACCATATGCCTGTCCAGAGTGTGGAAAAAGTTTTAGCAGA | NL--ZFP- |
| | AGCGACGACCTGGTTAGGCATCAACGAACTCACACAGGGGAAAAGCCG | SV40-NLS- |
| | TACAAATGTCCTGAATGCGGAAAGTCATTCTCCACTTCAGGTAGCCTCG | KRAB (DNA |
| | TGCGACATCAGCGCACACATACTGGCGAAAAACCTTATAAGTGTCCGG | Sequence) |
| | AATGCGGCAAGAGTTTTTCTAGAAGTGATAAGCTCGTGCGACACCAGCG | |
| | GACGCACACGGGTGAGAAGCCCTACGCCTGCCCAGAGTGCGGAAAGTC | |
| | CTTTAGTAGGTCTGACGAACTGGTCCGGCACCAACGAACCCATACAGGG | |
| | GAGAAACCCTACAAATGTCCAGAGTGCGGGAAATCATTTTCAACGTCTC | |
| | ACAGCTTGACGGAACATCAGAGGACCCATACAGGCGAAAAGCCTTACA | |
| | AATGTCCGGAGTGCGGAAAGTCTTTCAGCCGGGCTGATAATCTCACGGA | |
| | GCACCAAAGAACCCACACGGGTAAGAAAACCTCTGGCTCCGGACCGAA | |
| | AAAAAAGAGAAAGGTAAACGGCGGGGGAGGATCACGGACCCTGGTTA | |
| | CATTTAAGGACGTTTTTGTAGACTTCACGAGGGAGGAATGGAAGCTGTT | |
| | GGACACCGCCCAGCAAATCGTGTATCGAAATGTAATGTTGGAAAATTAT | |
| | AAAAATCTGGTTTCCCTCGGCTACCAATTGACAAAACCAGACGTCATCC | |
| | TCAGACTGGAAAAAGGGGAAGAACCTTGGCTTGTCTGA | |
| 938 | ATGGCACCGAAGAAAAAACGCAAAGTTGGTCGAGTACCCTTGGAGCCG | 3xFLAG-SV40 |
| | GGAGAAAAGCCATATGCCTGTCCGGAATGCGGCAAAAGCTTTTCAGAA | NLS--ZFP- |
| | CGGTCCCATTTGCGGGAACATCAGCGCACCCATACCGGAGAAAAGCCTT | SV40-NLS- |
| | ACAAGTGTCCCGAGTGTGGTAAGAGCTTTTCAACTTCCCACAGTCTCAC | KRAB (DNA |
| | TGAACATCAGCGAACTCACACAGGCGAAAAACCATACAAATGCCCGGA | Sequence) |
| | GTGTGGAAAGAGTTTTTCTCAAGCTGGGCACTTGGCCAGCCACCAAAGG | |
| | ACTCATACGGGCGAGAAACCGTATGCCTGTCCAGAATGCGGGAAATCA | |
| | TTTTCTACTAGTCATTCCCTTACGGAACATCAGAGAACGCACACCGGGG | |
| | AGAAGCCATACAAGTGTCCGGAGTGCGGAAAATCATTCTCCGACCCGG | |
| | GTCATCTCGTTCGCCATCAGAGGACTCATACTGGAGAGAAACCGTATAA | |
| | ATGTCCTGAATGCGGGAAGAGCTTTTCTACATCTGGGAACCTTGTGCGG | |
| | CACCAGCGAACCCACACGGGGAAAAAGACTTCTGGCTCCGGACCGAAA | |
| | AAAAAGAGAAAGGTAAACGGCGGGGGAGGATCACGGACCCTGGTTAC | |
| | ATTTAAGGACGTTTTTGTAGACTTCACGAGGGAGGAATGGAAGCTGTTG | |
| | GACACCGCCCAGCAAATCGTGTATCGAAATGTAATGTTGGAAAATTATA | |
| | AAAATCTGGTTTCCCTCGGCTACCAATTGACAAAACCAGACGTCATCCT | |
| | CAGACTGGAAAAAGGGGAAGAACCTTGGCTTGTCTGA | |
| 939 | ATGGCACCGAAGAAAAAACGCAAAGTTGGTCGAGTACCCCTGGAACCG | 3xFLAG-SV40 |
| | GGTGAAAAACCCTACGCTTGTCCCGAGTGTGGGAAATCATTCTCAAGGG | NLS--ZFP- |
| | CAGATAATCTTACGGAACATCAGCGCACACACACCGGGGAAAAACCCT | SV40-NLS- |
| | ATAAGTGCCCTGAGTGTGGTAAATCATTCTCTACGTCAGGGTCATTGGT | KRAB (DNA |
| | GCGCCATCAGAGGACCCATACAGGCGAAAAACCGTATAAGTGCCCCGA | Sequence) |
| | ATGCGGTAAAAGCTTCAGCAGAAAAGATAACTTGAAAAATCACCAACG | |
| | CACTCACACGGGAGAAAAACCGTACGCATGCCCGGAGTGCGGCAAGAG | |
| | TTTCAGTCAGAGTAGCTCACTTGTTCGCCACCAAAGAACCCACACAGGC | |
| | GAAAAGCCCTACAAGTGTCCTGAATGTGGAAAGAGTTTCAGTCGAAGT | |
| | GATAAATTGGTTAGGCACCAAAGAACACACACTGGAGAGAAACCGTAC | |
| | AAGTGTCCAGAATGTGGCAAGTCTTTTTCTGATTCTGGAAATTTGCGCGT | |
| | CCATCAAAGGACTCATACTGGGAAAAAGACGTCCGGCTCCGGACCGAA | |
| | AAAAAAGAGAAAGGTAAACGGCGGGGGAGGATCACGGACCCTGGTTA | |
| | CATTTAAGGACGTTTTTGTAGACTTCACGAGGGAGGAATGGAAGCTGTT | |
| | GGACACCGCCCAGCAAATCGTGTATCGAAATGTAATGTTGGAAAATTAT | |
| | AAAAATCTGGTTTCCCTCGGCTACCAATTGACAAAACCAGACGTCATCC | |
| | TCAGACTGGAAAAAGGGGAAGAACCTTGGCTTGTCTGA | |
| 940 | ATGGCACCGAAGAAAAAACGCAAAGTTGGTCGAGTACCCCTCGAACCA | 3xFLAG-SV40 |
| | GGGGAAAAGCCATACGCTTGCCCCGAGTGTGGAAAATCTTTCTCTCAGT | NLS--ZFP- |
| | CAAGCTCCCTTGTCAGACACCAGAGAACCCATACGGGTGAGAAACCAT | SV40-NLS- |
| | ACAAGTGCCCAGAGTGCGGCAAAAGCTTCAGTCAGAGTGGCGATCTGC | KRAB (DNA |
| | GCCGGCATCAAAGAACTCACACTGGAGAAAAGCCCTATAAGTGCCCCG | Sequence) |
| | AATGTGGAAAGAGTTTTTCCAGGAGTGACGAAAGAAAGAGACACCAGC | |
| | GGACTCACACCGGCGAGAAACCATACGCATGCCCCGAGTGCGGAAAAA | |
| | GTTTTTCCCACCGCACAACCCTTACCAATCATCAACGCACGCACACAGG | |
| | GGAGAAACCCTACAAGTGCCCGGAGTGTGGCAAGTCATTCAGCCGAAG | |
| | TGACCACCTCACTAACCACCAAAGGACTCACACAGGAGAAAAACCCTA | |
| | CAAATGTCCGGAGTGCGGAAAATCTTTTTCCACGTCCGGTGAGCTGGTC | |
| | CGCCATCAACGAACCCATACTGGTAAAAAAACTAGCGGCTCCGGACCG | |
| | AAAAAAAAGAGAAAGGTAAACGGCGGGGGAGGATCACGGACCCTGGT | |
| | TACATTTAAGGACGTTTTTGTAGACTTCACGAGGGAGGAATGGAAGCTG | |
| | TTGGACACCGCCCAGCAAATCGTGTATCGAAATGTAATGTTGGAAAATT | |
| | ATAAAAATCTGGTTTCCCTCGGCTACCAATTGACAAAACCAGACGTCAT | |
| | CCTCAGACTGGAAAAAGGGGAAGAACCTTGGCTTGTCTGA | |
| 941 | ATGGCACCGAAGAAAAAACGCAAAGTTGGTCGAGTACCCCTGGAACCC | 3xFLAG-SV40 |
| | GGGGAGAAGCCGTACGCTTGCCCAGAGTGCGGAAAGAGCTTCTCTCAG | NLS--ZFP- |
| | AGCGGAGACCTTAGACGCCACCAGCGAACCCACACCGGCGAAAAACCG | SV40-NLS- |
| | TATAAATGCCCGGAATGCGGCAAGAGTTTTAGTCGGTCCGATGAGCGA | KRAB (DNA |
| | AAGAGGCATCAACGAACCCATACGGGAGAGAAACCCTACAAGTGCCCT | Sequence) |
| | GAGTGTGGTAAGTCATTTTCCCACAGAACGACGTTGACGAATCACCAGA | |
| | GAACCCATACGGGTGAGAAACCTTACGCTTGCCCGGAGTGCGGCAAAA | |
| | GCTTCAGCCGGAGTGATCACTTGACCAATCATCAGAGGACACACACGG | |
| | GTGAGAAGCCCTACAAATGTCCCGAATGCGGCAAGTCTTTCTCAACGTC | |
| | AGGCGAACTCGTCCGGCACCAGCGAACACATACGGGAGAAAAGCCGTA | |
| | CAAATGTCCGGAATGCGGAAAGTCATTTTCACGGTCAGATGACTTGGTG | |
| | CGACACCAGCGCACTCACACAGGCAAGAAGACCTCAGGCTCCGGACCG | |
| | AAAAAAAAGAGAAAGGTAAACGGCGGGGGAGGATCACGGACCCTGGT | |
| | TACATTTAAGGACGTTTTTGTAGACTTCACGAGGGAGGAATGGAAGCTG | |
| | TTGGACACCGCCCAGCAAATCGTGTATCGAAATGTAATGTTGGAAAATT | |
| | ATAAAAATCTGGTTTCCCTCGGCTACCAATTGACAAAACCAGACGTCAT | |
| | CCTCAGACTGGAAAAAGGGGAAGAACCTTGGCTTGTCTGA | |
| 942 | ATGGCACCGAAGAAAAAACGCAAAGTTGGTCGAGTACCCCTGGAGCCT | 3xFLAG-SV40 |
| | GGTGAGAAGCCGTATGCATGTCCTGAGTGTGGGAAGTCATTTAGTCAGA | NLS--ZFP- |
| | GGGCCCACTTGGAACGACACCAAAGGACCCACACTGGTGAAAAACCCT | SV40-NLS- |
| | ACAAATGCCCAGAGTGTGGTAAGTCTTTTTCACAGCTGGCCCACCTGAG | KRAB (DNA |
| | AGCACACCAGCGAACTCATACGGGCGAGAAACCATACAAGTGTCCAGA | Sequence) |
| | GTGCGGAAAGTCATTCTCAGATCCCGGCCACTTGGTGCGACATCAGAGA | |
| | ACGCACACAGGGGAGAAGCCTTATGCTTGCCCGGAATGCGGGAAGTCT | |
| | TTCAGCCGCCGAAGTGCTTGTCGAAGGCACCAACGGACCCATACCGGTG | |
| | AGAAACCATATAAGTGCCCAGAGTGTGGAAAGAGTTTTAGTCGATCCG | |
| | ATCACCTGACTACGCACCAGCGGACGCACACAGGAGAGAAACCGTATA | |
| | AGTGCCCTGAATGCGGTAAGAGCTTCTCTCAATCAAGCTCACTGGTTAG | |
| | GCACCAACGCACTCATACCGGCAAGAAGACGTCAGGCTCCGGACCGAA | |
| | AAAAAAGAGAAAGGTAAACGGCGGGGGAGGATCACGGACCCTGGTTA | |
| | CATTTAAGGACGTTTTTGTAGACTTCACGAGGGAGGAATGGAAGCTGTT | |
| | GGACACCGCCCAGCAAATCGTGTATCGAAATGTAATGTTGGAAAATTAT | |
| | AAAAATCTGGTTTCCCTCGGCTACCAATTGACAAAACCAGACGTCATCC | |
| | TCAGACTGGAAAAAGGGGAAGAACCTTGGCTTGTCTGA | |
| 943 | ATGGCACCGAAGAAAAAACGCAAAGTTGGTCGAGTACCCCTTGAGCCG | 3xFLAG-SV40 |
| | GGGGAAAAGCCTTATGCTTGCCCAGAGTGTGGCAAGAGCTTCTCCCAAA | NLS--ZFP- |
| | GTTCAAACCTCGTCCGACACCAAAGGACTCACACGGGCGAAAAACCGT | SV40-NLS- |
| | ATAAATGCCCCGAGTGCGGAAAGTCATTTTCCAGGTCCGACGATCTGGT | KRAB (DNA |
| | CCGCCACCAGCGCACTCATACGGGGGAAAAGCCCTATAAGTGCCCTGA | Sequence) |
| | GTGCGGCAAGAGCTTCTCAACTCACCTGGATCTCATTCGCCATCAACGC | |
| | ACACATACAGGGGAGAAGCCTTACGCTTGTCCAGAGTGCGGCAAGTCTT | |
| | TCAGTACGAGCGGAAACCTGACGGAACACCAGCGAACCCACACGGGCG | |
| | AGAAGCCATATAAATGTCCCGAATGTGGAAAATCATTCTCTCGCCGATC | |
| | TGCGTGCCGCCGGCATCAGAGGACACATACCGGAGAAAAGCCGTACAA | |
| | ATGCCCCGAGTGTGGAAAATCCTTTAGCAGAAATGATACACTTACCGAG | |
| | CATCAGAGGACGCACACTGGAAAAAAGACATCTGGCTCCGGACCGAAA | |
| | AAAAAGAGAAAGGTAAACGGCGGGGGAGGATCACGGACCCTGGTTAC | |
| | ATTTAAGGACGTTTTTGTAGACTTCACGAGGGAGGAATGGAAGCTGTTG | |
| | GACACCGCCCAGCAAATCGTGTATCGAAATGTAATGTTGGAAAATTATA | |
| | AAAATCTGGTTTCCCTCGGCTACCAATTGACAAAACCAGACGTCATCCT | |
| | CAGACTGGAAAAAGGGGAAGAACCTTGGCTTGTCTGA | |
| 944 | MAPKKKRKVGRVPAAMAERPFQCRICMRNFSSEADRSRHIRTHTGEKPFA | 3xFLAG-SV40 |
| | CDICGRKFADRSNLTRHTKIHTGSQKPFQCRICMRNFSQSSDLSRHIRTHTG | NLS--ZFP- |
| | EKPFACDICGRKFAYHWYLKKHTKIHTGSQKPFQCRICMRNFSRSDSLSVHI | SV40-NLS- |
| | RTHTGEKPFACDICGRKFAQNANRKTHTKIHLRQKDAARGSGPKKKRKVN | KRAB fusion |
| | GGGGSRTLVTFKDVFVDFTREEWKLLDTAQQIVYRNVMLENYKNLVSLG | (AA Sequence) |
| | YQLTKPDVILRLEKGEEPWLV | |
| 945 | MAPKKKRKVGRVPAAMAERPFQCRICMRNFSRSDVLSTHIRTHTGEKPFA | 3xFLAG-SV40 |
| | CDICGKKFADNSSRTRHTKIHTGSQKPFQCRICMRNFSRPYTLRLHIRTHTG | NLS--ZFP- |
| | EKPFACDICGRKFADSSHRTRHTKIHTGSQKPFQCRICMRNFSRSDHLSQHI | SV40-NLS- |
| | RTHTGEKPFACDICGRKFADSSHRTRHTKIHLRQKDAARGSGPKKKRKVN | KRAB fusion |
| | GGGGSRTLVTFKDVFVDFTREEWKLLDTAQQIVYRNVMLENYKNLVSLG | (AA Sequence) |
| | YQLTKPDVILRLEKGEEPWLV | |
| 946 | MAPKKKRKVGRVPAAMAERPFQCRICMRNFSRSDHLSQHIRTHTGEKPFA | 3xFLAG-SV40 |
| | CDICGRKFAQSADRTKHTKIHTGSQKPFQCRICMRNFSRSDHLSQHIRTHTG | NLS--ZFP- |
| | EKPFACDICGRKFARRSDLKRHTKIHTGSQKPFQCRICMRNFSRSDHLSRHI | SV40-NLS- |
| | RTHTGEKPFACDICGRKFAQSSDLRRHTKIHLRQKDAARGSGPKKKRKVN | KRAB fusion |
| | GGGGSRTLVTFKDVFVDFTREEWKLLDTAQQIVYRNVMLENYKNLVSLG | (AA Sequence) |
| | YQLTKPDVILRLEKGEEPWLV | |
| 947 | MAPKKKRKVGRVPAAMAERPFQCRICMRNFSRSDNLSEHIRTHTGEKPFA | 3xFLAG-SV40 |
| | CDICGRKFATSSNRKTHTKIHTGSQKPFQCRICMRNFSDRSHLTRHIRTHTG | NLS--ZFP- |
| | EKPFACDICGRKFARSDALTQHTKIHTGSQKPFQCRICMRNFSDRSALARHI | SV40-NLS- |
| | RTHTGEKPFACDICGRKFARRFTLSKHTKIHLRQKDAARGSGPKKKRKVNG | KRAB fusion |
| | GGGSRTLVTFKDVFVDFTREEWKLLDTAQQIVYRNVMLENYKNLVSLGY | (AA Sequence) |
| | QLTKPDVILRLEKGEEPWLV | |
| 948 | MAPKKKRKVGRVPAAMAERPFQCRICMRNFSRSDHLSEHIRTHTGEKPFA | 3xFLAG-SV40 |
| | CDICGRKFAQYSGRYYHTKIHTGSQKPFQCRICMRNFSHGQTLNEHIRTHT | NLS--ZFP- |
| | GEKPFACDICGRKFAQSGNLARHTKIHTGSQKPFQCRICMRNFSRSDSLLRH | SV40-NLS- |
| | IRTHTGEKPFACDICGRKFACREYRGKHTKIHLRQKDAARGSGPKKKRKVN | KRAB fusion |
| | GGGGSRTLVTFKDVFVDFTREEWKLLDTAQQIVYRNVMLENYKNLVSLG | (AA Sequence) |
| | YQLTKPDVILRLEKGEEPWLV | |
| 949 | MAPKKKRKVGRVPAAMAERPFQCRICMRNFSQSANRTTHIRTHTGEKPFA | 3xFLAG-SV40 |
| | CDICGRKFARSANLTRHTKIHTGSQKPFQCRICMRNFSRSDVLSEHIRTHTG | NLS--ZFP- |
| | EKPFACDICGRKFATSGHLSRHTKIHTGSQKPFQCRICMRNFSQSSDLSRHIR | SV40-NLS- |
| | THTGEKPFACDICGRKFAQWSTRKRHTKIHLRQKDAARGSGPKKKRKVNG | KRAB fusion |
| | GGGSRTLVTFKDVFVDFTREEWKLLDTAQQIVYRNVMLENYKNLVSLGY | (AA Sequence) |
| | QLTKPDVILRLEKGEEPWLV | |
| 950 | MAPKKKRKVGRVPAAMAERPFQCRICMRNFSQSGNLARHIRTHTGEKPFA | 3xFLAG-SV40 |
| | CDICGRKFAATCCLAHHTKIHTGSQKPFQCRICMRNFSRWQYLPTHIRTHA | NLS--ZFP- |
| | GEKPFACDICGRKFADRSALARHTKIHTGSQKPFQCRICMRNFSRSDNLSEH | SV40-NLS- |
| | IRTHTGEKPFACDICGRKFAKRCNLRCHTKIHLRQKDAARGSGPKKKRKVN | KRAB fusion |
| | GGGGSRTLVTFKDVFVDFTREEWKLLDTAQQIVYRNVMLENYKNLVSLG | (AA Sequence) |
| | YQLTKPDVILRLEKGEEPWLV | |
| 951 | MAPKKKRKVGRVPAAMAERPFQCRICMRNFSNPANLTRHIRTHTGEKPFA | 3xFLAG-SV40 |
| | CDICGRKFAQNATRTKHTKIHTGSQKPFQCRICMRNFSQSGHLARHIRTHT | NLS--ZFP- |
| | GEKPFACDICGRKFANRHDRAKHTKIHTGSQKPFQCRICMRNFSRSDHLSE | SV40-NLS- |
| | HIRTHTGEKPFACDICGRKFAQRRSRYKHTKIHLRQKDAARGSGPKKKRKV | KRAB fusion |
| | NGGGGSRTLVTFKDVFVDFTREEWKLLDTAQQIVYRNVMLENYKNLVSL | (AA Sequence) |
| | GYQLTKPDVILRLEKGEEPWLV | |
| 952 | MAPKKKRKVGRVPAAMAERPFQCRICMRNFSQSSDLSRHIRTHTGEKPFAC | 3xFLAG-SV40 |
| | DICGRKFAHRSTRNRHTKIHTGSQKPFQCRICMRNFSRSDVLSAHIRTHTGE | NLS--ZFP- |
| | KPFACDICGRKFADSRTRKNHTKIHTGSQKPFQCRICMRNFSQSGSLTRHIR | SV40-NLS- |
| | THTGEKPFACDICGRKFADQSGLAHHTKIHLRQKDAARGSGPKKKRKVNG | KRAB fusion |
| | GGGSRTLVTFKDVFVDFTREEWKLLDTAQQIVYRNVMLENYKNLVSLGY | (AA Sequence) |
| | QLTKPDVILRLEKGEEPWLV | |
| 953 | MAPKKKRKVGRVPAAMAERPFQCRICMRNFSQNPAQWRHIRTHTGEKPFA | 3xFLAG-SV40 |
| | CDICGRKFARSADLSRHTKIHTGSQKPFQCRICMRNFSTSGSLSRHIRTHTGE | NLS--ZFP- |
| | KPFACDICGRKFARSDHLSRHTKIHTGSQKPFQCRICMRNFSRSDSLLRHIRT | SV40-NLS- |
| | HTGEKPFACDICGRKFAQSYDRFQHTKIHLRQKDAARGSGPKKKRKVNGG | KRAB fusion |
| | GGSRTLVTFKDVFVDFTREEWKLLDTAQQIVYRNVMLENYKNLVSLGYQL | (AA Sequence) |
| | TKPDVILRLEKGEEPWLV | |
| 954 | MAPKKKRKVGRVPAAMAERPFQCRICMRNFSTSGSLSRHIRTHTGEKPFAC | 3xFLAG-SV40 |
| | DICGRKFARSDHLSRHTKIHTGSQKPFQCRICMRNFSRSDSLLRHIRTHTGE | NLS--ZFP- |
| | KPFACDICGRKFAQSYDRFQHTKIHTGSQKPFQCRICMRNFSRSDNLSTHIR | SV40-NLS- |
| | THTGEKPFACDICGRKFADNRDRIKHTKIHLRQKDAARGSGPKKKRKVNG | KRAB fusion |
| | GGGSRTLVTFKDVFVDFTREEWKLLDTAQQIVYRNVMLENYKNLVSLGY | (AA Sequence) |
| | QLTKPDVILRLEKGEEPWLV | |
| 955 | MAPKKKRKVGRVPAAMAERPFQCRICMRNFSDRSNLSRHIRTHTGEKPFA | 3xFLAG-SV40 |
| | CDICGRKFALRQNLIMHTKIHTGSQKPFQCRICMRNFSERGTLARHIRTHTG | NLS--ZFP- |
| | EKPFACDICGRKFARSDALTQHTKIHTGSQKPFQCRICMRNFSRSDSLSQHI | SV40-NLS- |
| | RTHTGEKPFACDICGRKFARKADRTRHTKIHLRQKDAARGSGPKKKRKVN | KRAB fusion |
| | GGGGSRTLVTFKDVFVDFTREEWKLLDTAQQIVYRNVMLENYKNLVSLG | (AA Sequence) |
| | YQLTKPDVILRLEKGEEPWLV | |
| 956 | MAPKKKRKVGRVPAAMAERPFQCRICMRNFSQYCCLTNHIRTHTGEKPFA | 3xFLAG-SV40 |
| | CDICGRKFATSGNLTRHTKIHTGSQKPFQCRICMRNFSQSSDLSRHIRTHTG | NLS--ZFP- |
| | EKPFACDICGRKFAFRYYLKRHTKIHTGSQKPFQCRICMRNFSQSGDLTRHI | SV40-NLS- |
| | RTHTGEKPFACDICGRKFADKGNLTKHTKIHLRQKDAARGSGPKKKRKVN | KRAB fusion |
| | GGGGSRTLVTFKDVFVDFTREEWKLLDTAQQIVYRNVMLENYKNLVSLG | (AA Sequence) |
| | YQLTKPDVILRLEKGEEPWLV | |
| 957 | MAPKKKRKVGRVPAAMAERPFQCRICMRNFSTSGSLSRHIRTHTGEKPFAC | 3xFLAG-SV40 |
| | DICGRKFARSDNLTTHTKIHTGSQKPFQCRICMRNFSQSGNLARHIRTHTGE | NLS--ZFP- |
| | KPFACDICGRKFADRTTLMRHTKIHTGSQKPFQCRICMRNFSQSGHLARHIR | SV40-NLS- |
| | THTGEKPFACDICGRKFAQLTHLNSHTKIHLRQKDAARGSGPKKKRKVNG | KRAB fusion |
| | GGGSRTLVTFKDVFVDFTREEWKLLDTAQQIVYRNVMLENYKNLVSLGY | (AA Sequence) |
| | QLTKPDVILRLEKGEEPWLV | |
| 958 | MAPKKKRKVGRVPAAMAERPFQCRICMRNFSIKHDLHRHIRTHTGEKPFA | 3xFLAG-SV40 |
| | CDICGRKFARSANLTRHTKIHTGSQKPFQCRICMRNFSRSDNLARHIRTHTG | NLS--ZFP- |
| | EKPFACDICGRKFAQNVSRPRHTKIHTGSQKPFQCRICMRNFSRSDDLSKHI | SV40-NLS- |
| | RTHTGEKPFACDICGRKFADSSHRTRHTKIHLRQKDAARGSGPKKKRKVN | KRAB fusion |
| | GGGGSRTLVTFKDVFVDFTREEWKLLDTAQQIVYRNVMLENYKNLVSLG | (AA Sequence) |
| | YQLTKPDVILRLEKGEEPWLV | |
| 959 | MAPKKKRKVGRVPAAMAERPFQCRICMRNFSRSDNLARHIRTHTGEKPFA | 3xFLAG-SV40 |
| | CDICGRKFAQNVSRPRHTKIHTGSQKPFQCRICMRNFSRSDDLSKHIRTHTG | NLS--ZFP- |
| | EKPFACDICGRKFADSSHRTRHTKIHTGSQKPFQCRICMRNFSTSSNRKTHIR | SV40-NLS- |
| | THTGEKPFACDICGRKFAAQWTRACHTKIHLRQKDAARGSGPKKKRKVNG | KRAB fusion |
| | GGGSRTLVTFKDVFVDFTREEWKLLDTAQQIVYRNVMLENYKNLVSLGY | (AA Sequence) |
| | QLTKPDVILRLEKGEEPWLV | |
| 960 | MAPKKKRKVGRVPAAMAERPFQCRICMRNFSRSDDLSKHIRTHTGEKPFA | 3xFLAG-SV40 |
| | CDICGRKFADSSHRTRHTKIHTGSQKPFQCRICMRNFSTSSNRKTHIRTHTG | NLS--ZFP- |
| | EKPFACDICGRKFAAQWTRACHTKIHTGSQKPFQCRICMRNFSRKQTRTTH | SV40-NLS- |
| | IRTHTGEKPFACDICGRKFAHRSSLRRHTKIHLRQKDAARGSGPKKKRKVN | KRAB fusion |
| | GGGGSRTLVTFKDVFVDFTREEWKLLDTAQQIVYRNVMLENYKNLVSLG | (AA Sequence) |
| | YQLTKPDVILRLEKGEEPWLV | |
| 961 | MAPKKKRKVGRVPAAMAERPFQCRICMRNFSQSAHRKNHIRTHTGEKPFA | 3xFLAG-SV40 |
| | CDICGRKFATSSNRKTHTKIHTGSQKPFQCRICMRNFSRSDNLSAHIRTHTG | NLS--ZFP- |
| | EKPFACDICGRKFARNNDRKTHTKIHTGSQKPFQCRICMRNFSTSGSLSRHI | SV40-NLS- |
| | RTHTGEKPFACDICGRKFAQAGHLAKHTKIHLRQKDAARGSGPKKKRKVN | KRAB fusion |
| | GGGGSRTLVTFKDVFVDFTREEWKLLDTAQQIVYRNVMLENYKNLVSLG | (AA Sequence) |
| | YQLTKPDVILRLEKGEEPWLV | |
| 962 | MAPKKKRKVGRVPAAMAERPFQCRICMRNFSRSDHLSQHIRTHTGEKPFA | 3xFLAG-SV40 |
| | CDICGRKFAASSTRTKHTKIHTGSQKPFQCRICMRNFSRSDDLTRHIRTHTG | NLS--ZFP- |
| | EKPFACDICGRKFAQKSNLSSHTKIHTGSQKPFQCRICMRNFSQSANRTTHI | SV40-NLS- |
| | RTHTGEKPFACDICGRKFAQNATRTKHTKIHLRQKDAARGSGPKKKRKVN | KRAB fusion |
| | GGGGSRTLVTFKDVFVDFTREEWKLLDTAQQIVYRNVMLENYKNLVSLG | (AA Sequence) |
| | YQLTKPDVILRLEKGEEPWLV | |
| 963 | MAPKKKRKVGRVPAAMAERPFQCRICMRNFSRSDTLSEHIRTHTGEKPFAC | 3xFLAG-SV40 |
| | DICGRKFARRWTLVGHTKIHTGSQKPFQCRICMRNFSDRSNLSRHIRTHTGE | NLS--ZFP- |
| | KPFACDICGRKFAQSGDLTRHTKIHTGSQKPFQCRICMRNFSQSSDLSRHIR | SV40-NLS- |
| | THTGEKPFACDICGRKFAYHWYLKKHTKIHLRQKDAARGSGPKKKRKVN | KRAB fusion |
| | GGGGSRTLVTFKDVFVDFTREEWKLLDTAQQIVYRNVMLENYKNLVSLG | (AA Sequence) |
| | YQLTKPDVILRLEKGEEPWLV | |
| 964 | MAPKKKRKVGRVPAAMAERPFQCRICMRNFSRSANLARHIRTHTGEKPFA | 3xFLAG-SV40 |
| | CDICGRKFARSDNLREHTKIHTGSQKPFQCRICMRNFSRPYTLRLHIRTHTG | NLS--ZFP- |
| | EKPFACDICGRKFAHRSNLNKHTKIHTGSQKPFQCRICMRNFSQSGSLTRHI | SV40-NLS- |
| | RTHTGEKPFACDICGRKFATSANLSRHTKIHLRQKDAARGSGPKKKRKVN | KRAB fusion |
| | GGGGSRTLVTFKDVFVDFTREEWKLLDTAQQIVYRNVMLENYKNLVSLG | (AA Sequence) |
| | YQLTKPDVILRLEKGEEPWLV | |
| 965 | MAPKKKRKVGRVPLEPGEKPYACPECGKSFSRSDDLVRHQRTHTGEKPYK | 3xFLAG-SV40 |
| | CPECGKSFSTSGSLVRHQRTHTGEKPYKCPECGKSFSRSDKLVRHQRTHTG | NLS--ZFP- |
| | EKPYACPECGKSFSRSDELVRHQRTHTGEKPYKCPECGKSFSTSHSLTEHQR | SV40-NLS- |
| | THTGEKPYKCPECGKSFSRADNLTEHQRTHTGKKTSGSGPKKKRKVNGGG | KRAB fusion |
| | GSRTLVTFKDVFVDFTREEWKLLDTAQQIVYRNVMLENYKNLVSLGYQLT | (AA Sequence) |
| | KPDVILRLEKGEEPWLV | |
| 966 | MAPKKKRKVGRVPLEPGEKPYACPECGKSFSERSHLREHQRTHTGEKPYK | 3xFLAG-SV40 |
| | CPECGKSFSTSHSLTEHQRTHTGEKPYKCPECGKSFSQAGHLASHQRTHTG | NLS--ZFP- |
| | EKPYACPECGKSFSTSHSLTEHQRTHTGEKPYKCPECGKSFSDPGHLVRHQ | SV40-NLS- |
| | RTHTGEKPYKCPECGKSFSTSGNLVRHQRTHTGKKTSGSGPKKKRKVNGG | KRAB fusion |
| | GGSRTLVTFKDVFVDFTREEWKLLDTAQQIVYRNVMLENYKNLVSLGYQL | (AA Sequence) |
| | TKPDVILRLEKGEEPWLV | |
| 967 | MAPKKKRKVGRVPLEPGEKPYKCPECGKSFSRADNLTEHQRTHTGEKPYK | 3xFLAG-SV40 |
| | CPECGKSFSTSGSLVRHQRTHTGEKPYKCPECGKSFSRKDNLKNHQRTHTG | NLS--ZFP- |
| | EKPYKCPECGKSFSQSSSLVRHQRTHTGEKPYKCPECGKSFSRSDKLVRHQ | SV40-NLS- |
| | RTHTGEKPYKCPECGKSFSDSGNLRVHQRTHTGKKTSGSGPKKKRKVNGG | KRAB fusion |
| | GGSRTLVTFKDVFVDFTREEWKLLDTAQQIVYRNVMLENYKNLVSLGYQL | (AA Sequence) |
| | TKPDVILRLEKGEEPWLV | |
| 968 | MAPKKKRKVGRVPLEPGEKPYACPECGKSFSQSSSLVRHQRTHTGEKPYK | 3xFLAG-SV40 |
| | CPECGKSFSQSGDLRRHQRTHTGEKPYKCPECGKSFSRSDERKRHQRTHTG | NLS--ZFP- |
| | EKPYACPECGKSFSHRTTLTNHQRTHTGEKPYKCPECGKSFSRSDHLTNHQ | SV40-NLS- |
| | RTHTGEKPYKCPECGKSFSTSGELVRHQRTHTGKKTSGSGPKKKRKVNGG | KRAB fusion |
| | GGSRTLVTFKDVFVDFTREEWKLLDTAQQIVYRNVMLENYKNLVSLGYQL | (AA Sequence) |
| | TKPDVILRLEKGEEPWLV | |
| 969 | MAPKKKRKVGRVPLEPGEKPYACPECGKSFSQSGDLRRHQRTHTGEKPYK | 3xFLAG-SV40 |
| | CPECGKSFSRSDERKRHQRTHTGEKPYKCPECGKSFSHRTTLTNHQRTHTG | NLS--ZFP- |
| | EKPYACPECGKSFSRSDHLTNHQRTHTGEKPYKCPECGKSFSTSGELVRHQ | SV40-NLS- |
| | RTHTGEKPYKCPECGKSFSRSDDLVRHQRTHTGKKTSGSGPKKKRKVNGG | KRAB fusion |
| | GGSRTLVTFKDVFVDFTREEWKLLDTAQQIVYRNVMLENYKNLVSLGYQL | (AA Sequence) |
| | TKPDVILRLEKGEEPWLV | |
| 970 | MAPKKKRKVGRVPLEPGEKPYACPECGKSFSQRAHLERHQRTHTGEKPYK | 3xFLAG-SV40 |
| | CPECGKSFSQLAHLRAHQRTHTGEKPYKCPECGKSFSDPGHLVRHQRTHTG | NLS--ZFP- |
| | EKPYACPECGKSFSRRSACRRHQRTHTGEKPYKCPECGKSFSRSDHLTTHQ | SV40-NLS- |
| | RTHTGEKPYKCPECGKSFSQSSSLVRHQRTHTGKKTSGSGPKKKRKVNGG | KRAB fusion |
| | GGSRTLVTFKDVFVDFTREEWKLLDTAQQIVYRNVMLENYKNLVSLGYQL | (AA Sequence) |
| | TKPDVILRLEKGEEPWLV | |
| 971 | MAPKKKRKVGRVPLEPGEKPYACPECGKSFSQSSNLVRHQRTHTGEKPYK | 3xFLAG-SV40 |
| | CPECGKSFSRSDDLVRHQRTHTGEKPYKCPECGKSFSTHLDLIRHQRTHTG | NLS--ZFP- |
| | EKPYACPECGKSFSTSGNLTEHQRTHTGEKPYKCPECGKSFSRRSACRRHQ | SV40-NLS- |
| | RTHTGEKPYKCPECGKSFSRNDTLTEHQRTHTGKKTSGSGPKKKRKVNGG | KRAB fusion |
| | GGSRTLVTFKDVFVDFTREEWKLLDTAQQIVYRNVMLENYKNLVSLGYQL | (AA Sequence) |
| | TKPDVILRLEKGEEPWLV | |

### Example 9: Comparison Between Repression Induced by dSpCas9-KRAB and eZFP-KRAB Fusion Proteins

[1071] To compare the level of transcriptional repression induced by the eZFP-KRAB fusion proteins with the dSpCas9-KRAB and gRNA system, Hep3B cells were transfected via lipofectamine with mRNA encoding the most effective eZFP-KRAB fusion proteins set forth in SEQ ID NOs: 961, 962, or 968, and mRNA encoding dSpCas9-KRAB (SEQ ID NO. 595) with either gRNA HBVg_22 (SEQ ID NO:412) or HBVg_63 (SEQ ID NO: 453). Non-targeting (NT) gRNA, GFP, and ZFP-NT (non-targeting eZFP comprising a KRAB domain) were included as negative controls. The cells expressing the eZFP-KRAB fusion or the dSpCas9-KRAB proteins were assessed by qPCR for HBV RNA levels after three days. FIG. 30 shows a preliminary comparison between repression induced by i) HBVg_22 (SEQ ID NO: 412) in combination with dSpCas9-KRAB fusion protein (SEQ ID NO: 595), ii) HBVg_63 (SEQ ID NO: 453) in combination with dSpCas9-KRAB fusion protein (SEQ ID NO: 595), and iii) the most effective eZFP-KRAB fusion proteins set forth in SEQ ID NOs: 961,962, and 968. As shown in FIG. 30 the ZFP-KRAB fusion proteins induced transcriptional repression that was comparable to the repression mediated by the dSpCas9-KRAB fusion proteins.

[1072] FIGS. 31A and 31B depict the targeting positions of each eZFP along the HB X-promoter (HBx) start site. As shown in the FIGS. 31A-31B, the most effective eZFPs (set forth in SEQ ID NOs: 961, 962, and 968) targeted the same general region targeted by the gRNAs HBVg_22 (SEQ ID NO: 412) and HBVg_63 (SEQ ID NO: 453). These data show that significant repression was achieved using either DNA-binding domains. These results demonstrate the robustness of targeting the positions between 1250 base pairs (bp) to 1374 bp, and particularly the region 1260 bp to 1300 bp, of the HBV genome to induce transcriptional repression of HBV.

### Example 10: Strong Repression of cccDNA Achieved with the eZFP-KRAB Fusions in the HepG2.NTCP True Infection Model

[1073] The 28 eZFP-KRAB fusion proteins identified in Example 8 were screened in the HepG2.NTCP true infection model. HepG2.NTCP cells enable a true infection model of HBV as the HBV infection is sustained due to the generation and presence of native cccDNA.

[1074] The mRNA encoding the top 28 fusion proteins was generated and transfected via lipofectamine into the HepG2.NTCP cells in two batches. The cells expressing the eZFP-KRAB fusion proteins were assessed by qPCR for HBV RNA levels 6 days post-lipofection. FIGS. 32A-32B depict the fold change in total HBV RNA mediated by each eZFP-KRAB fusion protein in HepG2.NTCP cells. As shown in FIGS. 32A-32B, several eZFP-KRAB fusion proteins effectively repressed the HBV pregenomic (pgRNA) from the cccDNA by day six. FIG. 33 shows the fold change in total HBV RNA mediated by each eZFP-KRAB fusion protein across the HBx promoter position. The eZFP fusion proteins are color-coded by the percent of conservation across HBV subtypes. As shown in FIG. 33, several eZFP-KRAB fusion proteins targeted a range of sites across the HBx promoter region of the cccDNA and mediated transcriptional repression. Specifically, one of the best eZFP-KRAB repressor proteins (eZFP_18) showed about 91% conservation across the HBV subtypes.

[1075] Together, these results demonstrate robust repression of HBV expression by the eZFP-KRAB repressor proteins.

### Example 11: Durable HBV Repression Achieved with DNMT3A/L-eZFP-KRAB Fusion Proteins

[1076] Fusion proteins comprising DNMT3A/L (SEQ ID NO: 651), KRAB (SEQ ID NO:590), and one of the 12 most efficient eZFPs were designed to identify the DNMT3A/L-eZFP-KRAB fusion proteins with the highest transcriptional repression. The mRNA encoding the fusion proteins was generated and transfected via lipofectamine into Hep3B cells. The cells expressing the DNMT3A/L-eZFP-KRAB fusion proteins (Table E6) containing the eZFP linked to DNMT3A/L (SEQ ID NO:651) and KRAB (SEQ ID NO: 590) were assessed by qPCR for HBV RNA levels after day 4 or day 15. FIG. 34 shows the fold change in total HBV RNA mediated by each DNMT3A/L-eZFP-KRAB fusion protein. As shown in FIG. 34, several of the fusion proteins mediated transcriptional repression on day 4 and day 15. Specifically, the DNMT3A/L-eZFP-KRAB fusion proteins comprising eZFP_18 (SEQ ID NO:1017) and eZFP_19 (SEQ ID NO:1018) mediated the highest transcriptional repression by day 4, which was durable until day 15. The repression levels mediated by these fusion proteins was comparable to the levels mediated by DNMT3A/L-dSpCas9-KRAB (SEQ ID NO: 645) in combination with HBVg_22 (SEQ ID NO: 412).

[1077] To assess differentially-expressed genes (DEG) mediated by the DNMT3A/L-eZFP-KRAB fusion proteins, HepG2.NTCP cells were transfected with the mRNA encoding the DNMT3A/L-eZFP-KRAB fusion proteins. The RNA was harvested after 72 hours and RNA-sequencing was performed. FIG. 35 shows changes in differentially expressed genes mediated by the fusion proteins 72 hours post-lipofection. The results show that DNMT3A/L-eZFP-KRAB fusion proteins composed of eZFP_18 (SEQ ID NO:1017) and eZFP_19 (SEQ ID NO:1018) induced minimal off-target differential expression relative to lipid control. Additionally, no significantly altered gene expression was seen following delivery of HBVg_22 (SEQ ID NO: 412) with dSpCas9-KRAB (SEQ ID NO: 594). FIGS. 36A-36B shows changes in differentially-expressed genes mediated by the DNMT3A/L-eZFP-KRAB fusion proteins 72 hours post-lipofection as compared to either GFP (FIG. 36A) or non-targeting (NT) control (FIG. 36B). The DNMT3A/L-eZFP-KRAB fusion proteins composed of eZFP_18 (SEQ ID NO:1017) imparted minimal to no off-target differential expression compared to either GFP only or a non-targeting ZFP-KRAB_NT fusion control.

[1078] Together, these results show durable transcriptional repression of HBV RNA by the DNMT3A/L-eZFP-KRAB repressor fusion proteins composed of eZFP_18 (SEQ ID NO:1017) and eZFP_19 (SEQ ID NO:1018) mediated the highest transcriptional repression with minimal to no off-target gene expression. In general, these data support the therapeutic utility of the eZFPs, including in fusion proteins for targeted repression of HBV expression.

TABLE E6
DNMT3A/L-eZFP-KRAB fusion proteins

| SEQ | | |
|---|---|---|
| ID | | |
| NOs | Sequence | Description |
| 972 | ATGCACGATCAGGAGTTTGACCCCCCTAAGGTGTACCCACCCGTGCCAGCC | 3xFLAG- |
| | GAGAAGAGGAAGCCCATCCGCGTGCTGTCCCTGTTCGACGGCATCGCCAC | DNMT3AL- |
| | AGGCCTGCTGGTGCTGAAGGATCTGGGCATCCAGGTGGACAGATATATCG | XTEN80-SV40 |
| | CCTCCGAGGTGTGCGAGGATTCTATCACCGTGGGCATGGTGAGGCACCAG | NLS-ZFP-SV40 |
| | GGCAAGATCATGTACGTGGGCGACGTGCGCAGCGTGACACAGAAGCACAT | NLS-KRAB |
| | CCAGGAGTGGGGACCCTTCGACCTGGTCATCGGAGGCAGCCCCTGTAATG | (DNA sequence) |
| | ACCTGTCCATCGTGAACCCTGCAAGGAAGGGCCTGTATGAGGGAACCGGC | |
| | AGACTGTTCTTTGAGTTCTACAGGCTGCTGCACGACGCCCGCCCTAAGGAG | |
| | GGCGATGACAGGCCATTCTTTTGGCTGTTTGAGAACGTGGTGGCCATGGGC | |
| | GTGAGCGACAAGCGGGATATCTCCAGATTCCTGGAGTCTAATCCCGTGATG | |
| | ATCGATGCAAAGGAGGTGTCTGCCGCACACAGGGCAAGGTACTTTTGGGG | |
| | AAATCTGCCTGGCATGAACCGCCCACTGGCCAGCACCGTGAACGACAAGC | |
| | TGGAGCTGCAGGAGTGCCTGGAGCACGGAAGGATCGCCAAGTTCTCCAAG | |
| | GTGCGGACAATCACCACAAGATCTAACAGCATCAAGCAGGGCAAGGATCA | |
| | GCACTTCCCCGTGTTCATGAATGAGAAGGAGGACATCCTGTGGTGTACCGA | |
| | GATGGAGCGCGTGTTCGGCTTTCCAGTGCACTATACAGACGTGAGCAATAT | |
| | GAGCCGGCTGGCAAGGCAGAGACTGCTGGGCCGGTCCTGGTCTGTGCCAG | |
| | TGATCAGACACCTGTTCGCCCCCCTGAAGGAGTACTTTGCCTGCGTGTCTA | |
| | GCGGCAACTCTAATGCCAACAGCAGAGGCCCTTCCTTTTCCTCTGGCCTGG | |
| | TGCCACTGTCTCTGAGGGGCAGCCACATGGGCCCCATGGAGATCTACAAG | |
| | ACCGTGTCCGCCTGGAAGAGGCAGCCTGTGCGCGTGCTGTCTCTGTTCCGC | |
| | AACATCGACAAGGTGCTGAAGAGCCTGGGCTTTCTGGAGAGCGGATCCGG | |
| | ATCTGGAGGAGGCACCCTGAAGTATGTGGAGGATGTGACAAATGTGGTGC | |
| | GGAGAGATGTGGAGAAGTGGGGCCCCTTCGATCTGGTGTACGGATCCACC | |
| | CAGCCACTGGGAAGCTCCTGCGATAGGTGTCCAGGATGGTATATGTTCCAG | |
| | TTTCACAGAATCCTGCAGTACGCACTGCCAAGGCAGGAGAGCCAGCGCCC | |
| | TTTCTTTTGGATCTTTATGGACAACCTGCTGCTGACAGAGGATGACCAGGA | |
| | GACAACAACCCGCTTCCTGCAGACAGAGGCAGTGACCCTGCAGGATGTGA | |
| | GGGGACGCGACTATCAGAATGCCATGCGGGTGTGGTCTAACATCCCTGGC | |
| | CTGAAGAGCAAGCACGCCCCCCTGACCCCTAAGGAGGAGGAGTACCTGCA | |
| | GGCCCAGGTGCGGAGCAGATCCAAGCTGGATGCCCCTAAGGTGGACCTGC | |
| | TGGTGAAGAATTGTCTGCTGCCACTGCGGGAGTACTTCAAGTACTTTAGTC | |
| | AGAATAGCCTGCCACTGGGTGGACCTAGCTCTGGAGCCCCGCCTCCGTCAG | |
| | GTGGATCTCCTGCAGGTAGCCCAACTTCCACGGAAGAGGGCACGTCTGAG | |
| | AGTGCGACTCCTGAGAGCGGGCCTGGCACAAGTACTGAGCCCAGCGAAGG | |
| | TTCTGCACCCGGGTCTCCAGCTGGGAGCCCTACCTCAACAGAGGAAGGTAC | |
| | CAGCACAGAGCCTTCTGAGGGTAGCGCTCCTGGCACGTCCACCGAACCGTC | |
| | CGAGGGGATGGCACCGAAGAAAAAACGCAAAGTTGGTCGAGCTGCTATGG | |
| | CAGAGCGGCCATTTCAGTGTCGAATTTGCATGCGAAATTTCTCTAGCGAAG | |
| | CGGATCGAAGTAGACATATCCGGACCCATACGGGTGAGAAACCGTTCGCG | |
| | TGTGATATATGCGGTCGCAAATTCGCAGACCGCTCCAACCTGACAAGGCAC | |
| | ACAAAAATTCATACTGGAAGCCAGAAACCGTTTCAGTGCCGGATTTGTATG | |
| | CGCAATTTCTCTCAATCCTCCGATCTCTCCCGCCACATCAGGACTCATACCG | |
| | GGGAGAAACCCTTTGCTTGTGACATTTGTGGCAGAAAGTTTGCCTATCACT | |
| | GGTACCTTAAGAAGCACACCAAGATCCATACTGGCTCTCAAAAGCCTTTCC | |
| | AATGCCGAATATGTATGCGAAACTTTTCTAGGTCTGACTCCCTCTCTGTAC | |
| | ATATCCGCACTCACACGGGTGAAAAACCATTTGCCTGTGACATATGTGGCA | |
| | GAAAATTTGCTCAAAATGCGAACCGAAAAACGCATACGAAAATCCATTTG | |
| | CGACAAAAAGATGCAGCTCGGGCTCCGGACCGAAAAAAAAGAGAAAGGT | |
| | AAACGGCGGGGGAGGATCACGGACCCTGGTTACATTTAAGGACGTTTTTGT | |
| | AGACTTCACGAGGGAGGAATGGAAGCTGTTGGACACCGCCCAGCAAATCG | |
| | TGTATCGAAATGTAATGTTGGAAAATTATAAAAATCTGGTTTCCCTCGGCT | |
| | ACCAATTGACAAAACCAGACGTCATCCTCAGACTGGAAAAAGGGGAAGAA | |
| | CCTTGGCTTGTCTGA | |
| 973 | ATGCACGATCAGGAGTTTGACCCCCCTAAGGTGTACCCACCCGTGCCAGCC | 3xFLAG- |
| | GAGAAGAGGAAGCCCATCCGCGTGCTGTCCCTGTTCGACGGCATCGCCAC | DNMT3AL- |
| | AGGCCTGCTGGTGCTGAAGGATCTGGGCATCCAGGTGGACAGATATATCG | XTEN80-SV40 |
| | CCTCCGAGGTGTGCGAGGATTCTATCACCGTGGGCATGGTGAGGCACCAG | NLS-ZFP-SV40 |
| | GGCAAGATCATGTACGTGGGCGACGTGCGCAGCGTGACACAGAAGCACAT | NLS-KRAB |
| | CCAGGAGTGGGGACCCTTCGACCTGGTCATCGGAGGCAGCCCCTGTAATG | (DNA sequence) |
| | ACCTGTCCATCGTGAACCCTGCAAGGAAGGGCCTGTATGAGGGAACCGGC | |
| | AGACTGTTCTTTGAGTTCTACAGGCTGCTGCACGACGCCCGCCCTAAGGAG | |
| | GGCGATGACAGGCCATTCTTTTGGCTGTTTGAGAACGTGGTGGCCATGGGC | |
| | GTGAGCGACAAGCGGGATATCTCCAGATTCCTGGAGTCTAATCCCGTGATG | |
| | ATCGATGCAAAGGAGGTGTCTGCCGCACACAGGGCAAGGTACTTTTGGGG | |
| | AAATCTGCCTGGCATGAACCGCCCACTGGCCAGCACCGTGAACGACAAGC | |
| | TGGAGCTGCAGGAGTGCCTGGAGCACGGAAGGATCGCCAAGTTCTCCAAG | |
| | GTGCGGACAATCACCACAAGATCTAACAGCATCAAGCAGGGCAAGGATCA | |
| | GCACTTCCCCGTGTTCATGAATGAGAAGGAGGACATCCTGTGGTGTACCGA | |
| | GATGGAGCGCGTGTTCGGCTTTCCAGTGCACTATACAGACGTGAGCAATAT | |
| | GAGCCGGCTGGCAAGGCAGAGACTGCTGGGCCGGTCCTGGTCTGTGCCAG | |
| | TGATCAGACACCTGTTCGCCCCCCTGAAGGAGTACTTTGCCTGCGTGTCTA | |
| | GCGGCAACTCTAATGCCAACAGCAGAGGCCCTTCCTTTTCCTCTGGCCTGG | |
| | TGCCACTGTCTCTGAGGGGCAGCCACATGGGCCCCATGGAGATCTACAAG | |
| | ACCGTGTCCGCCTGGAAGAGGCAGCCTGTGCGCGTGCTGTCTCTGTTCCGC | |
| | AACATCGACAAGGTGCTGAAGAGCCTGGGCTTTCTGGAGAGCGGATCCGG | |
| | ATCTGGAGGAGGCACCCTGAAGTATGTGGAGGATGTGACAAATGTGGTGC | |
| | GGAGAGATGTGGAGAAGTGGGGCCCCTTCGATCTGGTGTACGGATCCACC | |
| | CAGCCACTGGGAAGCTCCTGCGATAGGTGTCCAGGATGGTATATGTTCCAG | |
| | TTTCACAGAATCCTGCAGTACGCACTGCCAAGGCAGGAGAGCCAGCGCCC | |
| | TTTCTTTTGGATCTTTATGGACAACCTGCTGCTGACAGAGGATGACCAGGA | |
| | GACAACAACCCGCTTCCTGCAGACAGAGGCAGTGACCCTGCAGGATGTGA | |
| | GGGGACGCGACTATCAGAATGCCATGCGGGTGTGGTCTAACATCCCTGGC | |
| | CTGAAGAGCAAGCACGCCCCCCTGACCCCTAAGGAGGAGGAGTACCTGCA | |
| | GGCCCAGGTGCGGAGCAGATCCAAGCTGGATGCCCCTAAGGTGGACCTGC | |
| | TGGTGAAGAATTGTCTGCTGCCACTGCGGGAGTACTTCAAGTACTTTAGTC | |
| | AGAATAGCCTGCCACTGGGTGGACCTAGCTCTGGAGCCCCGCCTCCGTCAG | |
| | GTGGATCTCCTGCAGGTAGCCCAACTTCCACGGAAGAGGGCACGTCTGAG | |
| | AGTGCGACTCCTGAGAGCGGGCCTGGCACAAGTACTGAGCCCAGCGAAGG | |
| | TTCTGCACCCGGGTCTCCAGCTGGGAGCCCTACCTCAACAGAGGAAGGTAC | |
| | CAGCACAGAGCCTTCTGAGGGTAGCGCTCCTGGCACGTCCACCGAACCGTC | |
| | CGAGGGGATGGCACCGAAGAAAAAACGCAAAGTTGGTCGAGCGGCAATG | |
| | GCAGAACGCCCGTTTCAGTGTAGAATCTGCATGCGCAATTTCTCCAGAAGT | |
| | GACGTACTCAGCACGCATATCAGAACACATACTGGTGAAAAACCGTTTGCT | |
| | TGTGATATCTGTGGTAAGAAATTCGCGGATAACTCCTCAAGGACGCGGCAT | |
| | ACGAAGATCCACACTGGTTCTCAAAAGCCGTTCCAGTGCCGGATATGCATG | |
| | CGGAACTTTAGTCGGCCATATACGCTTCGACTTCATATTAGGACTCACACC | |
| | GGCGAAAAGCCGTTCGCCTGTGACATTTGCGGGAGAAAATTCGCTGACTCT | |
| | AGTCACCGCACGAGGCACACTAAAATACATACTGGTTCACAAAAACCATT | |
| | CCAGTGCCGAATTTGCATGCGAAATTTTTCCCGAAGTGACCATCTCTCACA | |
| | GCACATCCGCACCCATACAGGGGAGAAGCCCTTCGCTTGTGATATATGCGG | |
| | ACGCAAGTTCGCGGACAGCTCACACCGGACCCGCCATACAAAGATCCACT | |
| | TGAGACAGAAAGATGCAGCGCGGGCTCCGGACCGAAAAAAAAGAGAAAG | |
| | GTAAACGGCGGGGGAGGATCACGGACCCTGGTTACATTTAAGGACGTTTTT | |
| | GTAGACTTCACGAGGGAGGAATGGAAGCTGTTGGACACCGCCCAGCAAAT | |
| | CGTGTATCGAAATGTAATGTTGGAAAATTATAAAAATCTGGTTTCCCTCGG | |
| | CTACCAATTGACAAAACCAGACGTCATCCTCAGACTGGAAAAAGGGGAAG | |
| | AACCTTGGCTTGTCTGA | |
| 974 | ATGCACGATCAGGAGTTTGACCCCCCTAAGGTGTACCCACCCGTGCCAGCC | 3xFLAG- |
| | GAGAAGAGGAAGCCCATCCGCGTGCTGTCCCTGTTCGACGGCATCGCCAC | DNMT3AL- |
| | AGGCCTGCTGGTGCTGAAGGATCTGGGCATCCAGGTGGACAGATATATCG | XTEN80-SV40 |
| | CCTCCGAGGTGTGCGAGGATTCTATCACCGTGGGCATGGTGAGGCACCAG | NLS-ZFP-SV40 |
| | GGCAAGATCATGTACGTGGGCGACGTGCGCAGCGTGACACAGAAGCACAT | NLS-KRAB |
| | CCAGGAGTGGGGACCCTTCGACCTGGTCATCGGAGGCAGCCCCTGTAATG | (DNA sequence) |
| | ACCTGTCCATCGTGAACCCTGCAAGGAAGGGCCTGTATGAGGGAACCGGC | |
| | AGACTGTTCTTTGAGTTCTACAGGCTGCTGCACGACGCCCGCCCTAAGGAG | |
| | GGCGATGACAGGCCATTCTTTTGGCTGTTTGAGAACGTGGTGGCCATGGGC | |
| | GTGAGCGACAAGCGGGATATCTCCAGATTCCTGGAGTCTAATCCCGTGATG | |
| | ATCGATGCAAAGGAGGTGTCTGCCGCACACAGGGCAAGGTACTTTTGGGG | |
| | AAATCTGCCTGGCATGAACCGCCCACTGGCCAGCACCGTGAACGACAAGC | |
| | TGGAGCTGCAGGAGTGCCTGGAGCACGGAAGGATCGCCAAGTTCTCCAAG | |
| | GTGCGGACAATCACCACAAGATCTAACAGCATCAAGCAGGGCAAGGATCA | |
| | GCACTTCCCCGTGTTCATGAATGAGAAGGAGGACATCCTGTGGTGTACCGA | |
| | GATGGAGCGCGTGTTCGGCTTTCCAGTGCACTATACAGACGTGAGCAATAT | |
| | GAGCCGGCTGGCAAGGCAGAGACTGCTGGGCCGGTCCTGGTCTGTGCCAG | |
| | TGATCAGACACCTGTTCGCCCCCCTGAAGGAGTACTTTGCCTGCGTGTCTA | |
| | GCGGCAACTCTAATGCCAACAGCAGAGGCCCTTCCTTTTCCTCTGGCCTGG | |
| | TGCCACTGTCTCTGAGGGGCAGCCACATGGGCCCCATGGAGATCTACAAG | |
| | ACCGTGTCCGCCTGGAAGAGGCAGCCTGTGCGCGTGCTGTCTCTGTTCCGC | |
| | AACATCGACAAGGTGCTGAAGAGCCTGGGCTTTCTGGAGAGCGGATCCGG | |
| | ATCTGGAGGAGGCACCCTGAAGTATGTGGAGGATGTGACAAATGTGGTGC | |
| | GGAGAGATGTGGAGAAGTGGGGCCCCTTCGATCTGGTGTACGGATCCACC | |
| | CAGCCACTGGGAAGCTCCTGCGATAGGTGTCCAGGATGGTATATGTTCCAG | |
| | TTTCACAGAATCCTGCAGTACGCACTGCCAAGGCAGGAGAGCCAGCGCCC | |
| | TTTCTTTTGGATCTTTATGGACAACCTGCTGCTGACAGAGGATGACCAGGA | |
| | GACAACAACCCGCTTCCTGCAGACAGAGGCAGTGACCCTGCAGGATGTGA | |
| | GGGGACGCGACTATCAGAATGCCATGCGGGTGTGGTCTAACATCCCTGGC | |
| | CTGAAGAGCAAGCACGCCCCCCTGACCCCTAAGGAGGAGGAGTACCTGCA | |
| | GGCCCAGGTGCGGAGCAGATCCAAGCTGGATGCCCCTAAGGTGGACCTGC | |
| | TGGTGAAGAATTGTCTGCTGCCACTGCGGGAGTACTTCAAGTACTTTAGTC | |
| | AGAATAGCCTGCCACTGGGTGGACCTAGCTCTGGAGCCCCGCCTCCGTCAG | |
| | GTGGATCTCCTGCAGGTAGCCCAACTTCCACGGAAGAGGGCACGTCTGAG | |
| | AGTGCGACTCCTGAGAGCGGGCCTGGCACAAGTACTGAGCCCAGCGAAGG | |
| | TTCTGCACCCGGGTCTCCAGCTGGGAGCCCTACCTCAACAGAGGAAGGTAC | |
| | CAGCACAGAGCCTTCTGAGGGTAGCGCTCCTGGCACGTCCACCGAACCGTC | |
| | CGAGGGGATGGCACCGAAGAAAAAACGCAAAGTTGGTCGAGCCGCAATG | |
| | GCCGAAAGACCATTTCAGTGCAGGATATGTATGCGCAACTTCTCTCGCAGT | |
| | GACCACCTGAGTCAACATATCAGGACACACACGGGTGAAAAGCCTTTTGC | |
| | ATGCGATATTTGTGGTCGAAAATTTGCTCAGTCTGCGGACCGAACCAAGCA | |
| | CACTAAAATTCATACCGGCTCACAGAAACCGTTTCAATGCCGCATCTGTAT | |
| | GAGGAATTTCTCTAGATCAGACCACTTGTCCCAACACATCCGGACTCATAC | |
| | TGGAGAAAAGCCGTTTGCATGTGACATTTGTGGCAGGAAGTTTGCTAGAA | |
| | GGTCTGACCTTAAAAGGCACACAAAAATTCATACGGGTTCCCAGAAACCA | |
| | TTTCAGTGCCGGATATGCATGCGGAACTTTTCACGAAGCGACCACCTCTCC | |
| | CGACATATTCGAACGCACACTGGTGAGAAGCCGTTTGCTTGCGACATTTGC | |
| | GGACGCAAGTTCGCTCAGAGCTCCGACTTGAGGAGGCATACCAAGATTCA | |
| | TCTCCGGCAGAAAGATGCCGCGCGGGCTCCGGACCGAAAAAAAAGAGAA | |
| | AGGTAAACGGCGGGGGAGGATCACGGACCCTGGTTACATTTAAGGACGTT | |
| | TTTGTAGACTTCACGAGGGAGGAATGGAAGCTGTTGGACACCGCCCAGCA | |
| | AATCGTGTATCGAAATGTAATGTTGGAAAATTATAAAAATCTGGTTTCCCT | |
| | CGGCTACCAATTGACAAAACCAGACGTCATCCTCAGACTGGAAAAAGGGG | |
| | AAGAACCTTGGCTTGTCTGA | |
| 975 | ATGCACGATCAGGAGTTTGACCCCCCTAAGGTGTACCCACCCGTGCCAGCC | 3xFLAG- |
| | GAGAAGAGGAAGCCCATCCGCGTGCTGTCCCTGTTCGACGGCATCGCCAC | DNMT3AL- |
| | AGGCCTGCTGGTGCTGAAGGATCTGGGCATCCAGGTGGACAGATATATCG | XTEN80-SV40 |
| | CCTCCGAGGTGTGCGAGGATTCTATCACCGTGGGCATGGTGAGGCACCAG | NLS-ZFP-SV40 |
| | GGCAAGATCATGTACGTGGGCGACGTGCGCAGCGTGACACAGAAGCACAT | NLS-KRAB |
| | CCAGGAGTGGGGACCCTTCGACCTGGTCATCGGAGGCAGCCCCTGTAATG | (DNA sequence) |
| | ACCTGTCCATCGTGAACCCTGCAAGGAAGGGCCTGTATGAGGGAACCGGC | |
| | AGACTGTTCTTTGAGTTCTACAGGCTGCTGCACGACGCCCGCCCTAAGGAG | |
| | GGCGATGACAGGCCATTCTTTTGGCTGTTTGAGAACGTGGTGGCCATGGGC | |
| | GTGAGCGACAAGCGGGATATCTCCAGATTCCTGGAGTCTAATCCCGTGATG | |
| | ATCGATGCAAAGGAGGTGTCTGCCGCACACAGGGCAAGGTACTTTTGGGG | |
| | AAATCTGCCTGGCATGAACCGCCCACTGGCCAGCACCGTGAACGACAAGC | |
| | TGGAGCTGCAGGAGTGCCTGGAGCACGGAAGGATCGCCAAGTTCTCCAAG | |
| | GTGCGGACAATCACCACAAGATCTAACAGCATCAAGCAGGGCAAGGATCA | |
| | GCACTTCCCCGTGTTCATGAATGAGAAGGAGGACATCCTGTGGTGTACCGA | |
| | GATGGAGCGCGTGTTCGGCTTTCCAGTGCACTATACAGACGTGAGCAATAT | |
| | GAGCCGGCTGGCAAGGCAGAGACTGCTGGGCCGGTCCTGGTCTGTGCCAG | |
| | TGATCAGACACCTGTTCGCCCCCCTGAAGGAGTACTTTGCCTGCGTGTCTA | |
| | GCGGCAACTCTAATGCCAACAGCAGAGGCCCTTCCTTTTCCTCTGGCCTGG | |
| | TGCCACTGTCTCTGAGGGGCAGCCACATGGGCCCCATGGAGATCTACAAG | |
| | ACCGTGTCCGCCTGGAAGAGGCAGCCTGTGCGCGTGCTGTCTCTGTTCCGC | |
| | AACATCGACAAGGTGCTGAAGAGCCTGGGCTTTCTGGAGAGCGGATCCGG | |
| | ATCTGGAGGAGGCACCCTGAAGTATGTGGAGGATGTGACAAATGTGGTGC | |
| | GGAGAGATGTGGAGAAGTGGGGCCCCTTCGATCTGGTGTACGGATCCACC | |
| | CAGCCACTGGGAAGCTCCTGCGATAGGTGTCCAGGATGGTATATGTTCCAG | |
| | TTTCACAGAATCCTGCAGTACGCACTGCCAAGGCAGGAGAGCCAGCGCCC | |
| | TTTCTTTTGGATCTTTATGGACAACCTGCTGCTGACAGAGGATGACCAGGA | |
| | GACAACAACCCGCTTCCTGCAGACAGAGGCAGTGACCCTGCAGGATGTGA | |
| | GGGGACGCGACTATCAGAATGCCATGCGGGTGTGGTCTAACATCCCTGGC | |
| | CTGAAGAGCAAGCACGCCCCCCTGACCCCTAAGGAGGAGGAGTACCTGCA | |
| | GGCCCAGGTGCGGAGCAGATCCAAGCTGGATGCCCCTAAGGTGGACCTGC | |
| | TGGTGAAGAATTGTCTGCTGCCACTGCGGGAGTACTTCAAGTACTTTAGTC | |
| | AGAATAGCCTGCCACTGGGTGGACCTAGCTCTGGAGCCCCGCCTCCGTCAG | |
| | GTGGATCTCCTGCAGGTAGCCCAACTTCCACGGAAGAGGGCACGTCTGAG | |
| | AGTGCGACTCCTGAGAGCGGGCCTGGCACAAGTACTGAGCCCAGCGAAGG | |
| | TTCTGCACCCGGGTCTCCAGCTGGGAGCCCTACCTCAACAGAGGAAGGTAC | |
| | CAGCACAGAGCCTTCTGAGGGTAGCGCTCCTGGCACGTCCACCGAACCGTC | |
| | CGAGGGGATGGCACCGAAGAAAAAACGCAAAGTTGGTCGAGCCGCGATG | |
| | GCTGAGAGACCATTTCAGTGTCGAATCTGCATGAGAAATTTTTCAAGGAGT | |
| | GACAATCTGTCTGAGCACATACGAACACATACTGGGGAAAAACCCTTTGC | |
| | ATGTGACATTTGTGGAAGAAAGTTTGCTACCAGCTCAAATCGCAAAACAC | |
| | ATACAAAGATACATACCGGCTCCCAAAAGCCATTCCAGTGCCGCATCTGCA | |
| | TGAGGAACTTTTCCGATCGCTCACATCTTACCCGCCACATAAGAACTCACA | |
| | CAGGCGAAAAGCCCTTTGCCTGCGATATATGCGGACGGAAGTTCGCCCGCT | |
| | CCGACGCTTTGACCCAGCATACCAAAATCCATACTGGGTCTCAAAAGCCAT | |
| | TTCAGTGCCGAATCTGTATGAGGAATTTCTCCGACAGGTCAGCATTGGCAC | |
| | GGCATATCCGCACCCATACCGGTGAGAAGCCTTTTGCTTGCGATATCTGTG | |
| | GACGAAAATTTGCCCGGAGGTTCACTCTCTCCAAACACACAAAGATACATC | |
| | TGCGCCAAAAGGATGCAGCCCGGGCTCCGGACCGAAAAAAAAGAGAAAG | |
| | GTAAACGGCGGGGGAGGATCACGGACCCTGGTTACATTTAAGGACGTTTTT | |
| | GTAGACTTCACGAGGGAGGAATGGAAGCTGTTGGACACCGCCCAGCAAAT | |
| | CGTGTATCGAAATGTAATGTTGGAAAATTATAAAAATCTGGTTTCCCTCGG | |
| | CTACCAATTGACAAAACCAGACGTCATCCTCAGACTGGAAAAAGGGGAAG | |
| | AACCTTGGCTTGTCTGA | |
| 976 | ATGCACGATCAGGAGTTTGACCCCCCTAAGGTGTACCCACCCGTGCCAGCC | 3xFLAG- |
| | GAGAAGAGGAAGCCCATCCGCGTGCTGTCCCTGTTCGACGGCATCGCCAC | DNMT3AL- |
| | AGGCCTGCTGGTGCTGAAGGATCTGGGCATCCAGGTGGACAGATATATCG | XTEN80-SV40 |
| | CCTCCGAGGTGTGCGAGGATTCTATCACCGTGGGCATGGTGAGGCACCAG | NLS-ZFP-SV40 |
| | GGCAAGATCATGTACGTGGGCGACGTGCGCAGCGTGACACAGAAGCACAT | NLS-KRAB |
| | CCAGGAGTGGGGACCCTTCGACCTGGTCATCGGAGGCAGCCCCTGTAATG | (DNA sequence) |
| | ACCTGTCCATCGTGAACCCTGCAAGGAAGGGCCTGTATGAGGGAACCGGC | |
| | AGACTGTTCTTTGAGTTCTACAGGCTGCTGCACGACGCCCGCCCTAAGGAG | |
| | GGCGATGACAGGCCATTCTTTTGGCTGTTTGAGAACGTGGTGGCCATGGGC | |
| | GTGAGCGACAAGCGGGATATCTCCAGATTCCTGGAGTCTAATCCCGTGATG | |
| | ATCGATGCAAAGGAGGTGTCTGCCGCACACAGGGCAAGGTACTTTTGGGG | |
| | AAATCTGCCTGGCATGAACCGCCCACTGGCCAGCACCGTGAACGACAAGC | |
| | TGGAGCTGCAGGAGTGCCTGGAGCACGGAAGGATCGCCAAGTTCTCCAAG | |
| | GTGCGGACAATCACCACAAGATCTAACAGCATCAAGCAGGGCAAGGATCA | |
| | GCACTTCCCCGTGTTCATGAATGAGAAGGAGGACATCCTGTGGTGTACCGA | |
| | GATGGAGCGCGTGTTCGGCTTTCCAGTGCACTATACAGACGTGAGCAATAT | |
| | GAGCCGGCTGGCAAGGCAGAGACTGCTGGGCCGGTCCTGGTCTGTGCCAG | |
| | TGATCAGACACCTGTTCGCCCCCCTGAAGGAGTACTTTGCCTGCGTGTCTA | |
| | GCGGCAACTCTAATGCCAACAGCAGAGGCCCTTCCTTTTCCTCTGGCCTGG | |
| | TGCCACTGTCTCTGAGGGGCAGCCACATGGGCCCCATGGAGATCTACAAG | |
| | ACCGTGTCCGCCTGGAAGAGGCAGCCTGTGCGCGTGCTGTCTCTGTTCCGC | |
| | AACATCGACAAGGTGCTGAAGAGCCTGGGCTTTCTGGAGAGCGGATCCGG | |
| | ATCTGGAGGAGGCACCCTGAAGTATGTGGAGGATGTGACAAATGTGGTGC | |
| | GGAGAGATGTGGAGAAGTGGGGCCCCTTCGATCTGGTGTACGGATCCACC | |
| | CAGCCACTGGGAAGCTCCTGCGATAGGTGTCCAGGATGGTATATGTTCCAG | |
| | TTTCACAGAATCCTGCAGTACGCACTGCCAAGGCAGGAGAGCCAGCGCCC | |
| | TTTCTTTTGGATCTTTATGGACAACCTGCTGCTGACAGAGGATGACCAGGA | |
| | GACAACAACCCGCTTCCTGCAGACAGAGGCAGTGACCCTGCAGGATGTGA | |
| | GGGGACGCGACTATCAGAATGCCATGCGGGTGTGGTCTAACATCCCTGGC | |
| | CTGAAGAGCAAGCACGCCCCCCTGACCCCTAAGGAGGAGGAGTACCTGCA | |
| | GGCCCAGGTGCGGAGCAGATCCAAGCTGGATGCCCCTAAGGTGGACCTGC | |
| | TGGTGAAGAATTGTCTGCTGCCACTGCGGGAGTACTTCAAGTACTTTAGTC | |
| | AGAATAGCCTGCCACTGGGTGGACCTAGCTCTGGAGCCCCGCCTCCGTCAG | |
| | GTGGATCTCCTGCAGGTAGCCCAACTTCCACGGAAGAGGGCACGTCTGAG | |
| | AGTGCGACTCCTGAGAGCGGGCCTGGCACAAGTACTGAGCCCAGCGAAGG | |
| | TTCTGCACCCGGGTCTCCAGCTGGGAGCCCTACCTCAACAGAGGAAGGTAC | |
| | CAGCACAGAGCCTTCTGAGGGTAGCGCTCCTGGCACGTCCACCGAACCGTC | |
| | CGAGGGGATGGCACCGAAGAAAAAACGCAAAGTTGGTCGAGCCGCAATG | |
| | GCTGAGCGCCCGTTCCAGTGCAGAATATGCATGCGGAATTTTTCTAGGTCA | |
| | GATCATTTGTCTGAGCATATTCGCACACACACGGGAGAGAAGCCCTTTGCT | |
| | TGCGATATATGTGGAAGGAAATTCGCGCAATACAGTGGGCGCTACTACCA | |
| | TACAAAGATCCATACGGGCTCCCAGAAGCCCTTCCAATGTCGAATATGTAT | |
| | GAGGAATTTTAGTCACGGACAAACATTGAATGAACATATACGCACTCACA | |
| | CTGGTGAAAAACCATTTGCGTGCGATATTTGCGGAAGGAAGTTTGCTCAGT | |
| | CTGGGAATTTGGCGCGACACACCAAGATCCACACAGGATCCCAGAAACCA | |
| | TTTCAGTGCAGAATTTGTATGAGAAACTTTAGCCGCAGTGACAGTCTCTTG | |
| | AGGCACATACGGACTCATACTGGGGAGAAACCATTCGCCTGCGATATTTGT | |
| | GGACGAAAGTTCGCCTGTCGCGAGTACAGAGGCAAGCACACTAAGATACA | |
| | TCTTAGGCAAAAGGACGCTGCACGGGCTCCGGACCGAAAAAAAAGAGAA | |
| | AGGTAAACGGCGGGGGAGGATCACGGACCCTGGTTACATTTAAGGACGTT | |
| | TTTGTAGACTTCACGAGGGAGGAATGGAAGCTGTTGGACACCGCCCAGCA | |
| | AATCGTGTATCGAAATGTAATGTTGGAAAATTATAAAAATCTGGTTTCCCT | |
| | CGGCTACCAATTGACAAAACCAGACGTCATCCTCAGACTGGAAAAAGGGG | |
| | AAGAACCTTGGCTTGTCTGA | |
| 977 | ATGCACGATCAGGAGTTTGACCCCCCTAAGGTGTACCCACCCGTGCCAGCC | 3xFLAG- |
| | GAGAAGAGGAAGCCCATCCGCGTGCTGTCCCTGTTCGACGGCATCGCCAC | DNMT3AL- |
| | AGGCCTGCTGGTGCTGAAGGATCTGGGCATCCAGGTGGACAGATATATCG | XTEN80-SV40 |
| | CCTCCGAGGTGTGCGAGGATTCTATCACCGTGGGCATGGTGAGGCACCAG | NLS-ZFP-SV40 |
| | GGCAAGATCATGTACGTGGGCGACGTGCGCAGCGTGACACAGAAGCACAT | NLS-KRAB |
| | CCAGGAGTGGGGACCCTTCGACCTGGTCATCGGAGGCAGCCCCTGTAATG | (DNA sequence) |
| | ACCTGTCCATCGTGAACCCTGCAAGGAAGGGCCTGTATGAGGGAACCGGC | |
| | AGACTGTTCTTTGAGTTCTACAGGCTGCTGCACGACGCCCGCCCTAAGGAG | |
| | GGCGATGACAGGCCATTCTTTTGGCTGTTTGAGAACGTGGTGGCCATGGGC | |
| | GTGAGCGACAAGCGGGATATCTCCAGATTCCTGGAGTCTAATCCCGTGATG | |
| | ATCGATGCAAAGGAGGTGTCTGCCGCACACAGGGCAAGGTACTTTTGGGG | |
| | AAATCTGCCTGGCATGAACCGCCCACTGGCCAGCACCGTGAACGACAAGC | |
| | TGGAGCTGCAGGAGTGCCTGGAGCACGGAAGGATCGCCAAGTTCTCCAAG | |
| | GTGCGGACAATCACCACAAGATCTAACAGCATCAAGCAGGGCAAGGATCA | |
| | GCACTTCCCCGTGTTCATGAATGAGAAGGAGGACATCCTGTGGTGTACCGA | |
| | GATGGAGCGCGTGTTCGGCTTTCCAGTGCACTATACAGACGTGAGCAATAT | |
| | GAGCCGGCTGGCAAGGCAGAGACTGCTGGGCCGGTCCTGGTCTGTGCCAG | |
| | TGATCAGACACCTGTTCGCCCCCCTGAAGGAGTACTTTGCCTGCGTGTCTA | |
| | GCGGCAACTCTAATGCCAACAGCAGAGGCCCTTCCTTTTCCTCTGGCCTGG | |
| | TGCCACTGTCTCTGAGGGGCAGCCACATGGGCCCCATGGAGATCTACAAG | |
| | ACCGTGTCCGCCTGGAAGAGGCAGCCTGTGCGCGTGCTGTCTCTGTTCCGC | |
| | AACATCGACAAGGTGCTGAAGAGCCTGGGCTTTCTGGAGAGCGGATCCGG | |
| | ATCTGGAGGAGGCACCCTGAAGTATGTGGAGGATGTGACAAATGTGGTGC | |
| | GGAGAGATGTGGAGAAGTGGGGCCCCTTCGATCTGGTGTACGGATCCACC | |
| | CAGCCACTGGGAAGCTCCTGCGATAGGTGTCCAGGATGGTATATGTTCCAG | |
| | TTTCACAGAATCCTGCAGTACGCACTGCCAAGGCAGGAGAGCCAGCGCCC | |
| | TTTCTTTTGGATCTTTATGGACAACCTGCTGCTGACAGAGGATGACCAGGA | |
| | GACAACAACCCGCTTCCTGCAGACAGAGGCAGTGACCCTGCAGGATGTGA | |
| | GGGGACGCGACTATCAGAATGCCATGCGGGTGTGGTCTAACATCCCTGGC | |
| | CTGAAGAGCAAGCACGCCCCCCTGACCCCTAAGGAGGAGGAGTACCTGCA | |
| | GGCCCAGGTGCGGAGCAGATCCAAGCTGGATGCCCCTAAGGTGGACCTGC | |
| | TGGTGAAGAATTGTCTGCTGCCACTGCGGGAGTACTTCAAGTACTTTAGTC | |
| | AGAATAGCCTGCCACTGGGTGGACCTAGCTCTGGAGCCCCGCCTCCGTCAG | |
| | GTGGATCTCCTGCAGGTAGCCCAACTTCCACGGAAGAGGGCACGTCTGAG | |
| | AGTGCGACTCCTGAGAGCGGGCCTGGCACAAGTACTGAGCCCAGCGAAGG | |
| | TTCTGCACCCGGGTCTCCAGCTGGGAGCCCTACCTCAACAGAGGAAGGTAC | |
| | CAGCACAGAGCCTTCTGAGGGTAGCGCTCCTGGCACGTCCACCGAACCGTC | |
| | CGAGGGGATGGCACCGAAGAAAAAACGCAAAGTTGGTCGAGCCGCGATG | |
| | GCTGAGAGGCCTTTTCAATGTCGAATCTGTATGAGGAACTTCTCTCAATCT | |
| | GCTAATCGCACGACGCACATTCGAACGCATACCGGTGAGAAGCCATTCGC | |
| | GTGCGATATCTGCGGACGGAAATTCGCGAGGTCAGCTAATCTTACACGGC | |
| | ACACGAAGATCCACACAGGGTCACAGAAACCTTTTCAGTGTCGCATTTGCA | |
| | TGAGGAATTTCTCCCGATCTGACGTCCTTAGCGAACATATACGAACTCACA | |
| | CGGGCGAGAAGCCATTTGCGTGCGATATATGCGGGAGGAAGTTTGCCACC | |
| | TCTGGACATCTGAGTCGACATACCAAAATTCATACCGGTAGTCAGAAGCCG | |
| | TTCCAATGCAGAATATGTATGCGAAATTTCTCTCAAAGCTCAGACTTGTCT | |
| | AGGCACATAAGAACGCACACGGGTGAAAAACCTTTCGCGTGTGATATCTG | |
| | CGGCAGAAAGTTCGCACAATGGTCCACCCGAAAGCGGCATACGAAGATTC | |
| | ACCTCAGACAGAAAGACGCTGCCCGGGCTCCGGACCGAAAAAAAAGAGA | |
| | AAGGTAAACGGCGGGGGAGGATCACGGACCCTGGTTACATTTAAGGACGT | |
| | TTTTGTAGACTTCACGAGGGAGGAATGGAAGCTGTTGGACACCGCCCAGC | |
| | AAATCGTGTATCGAAATGTAATGTTGGAAAATTATAAAAATCTGGTTTCCC | |
| | TCGGCTACCAATTGACAAAACCAGACGTCATCCTCAGACTGGAAAAAGGG | |
| | GAAGAACCTTGGCTTGTCTGA | |
| 978 | ATGCACGATCAGGAGTTTGACCCCCCTAAGGTGTACCCACCCGTGCCAGCC | 3xFLAG- |
| | GAGAAGAGGAAGCCCATCCGCGTGCTGTCCCTGTTCGACGGCATCGCCAC | DNMT3AL- |
| | AGGCCTGCTGGTGCTGAAGGATCTGGGCATCCAGGTGGACAGATATATCG | XTEN80-SV40 |
| | CCTCCGAGGTGTGCGAGGATTCTATCACCGTGGGCATGGTGAGGCACCAG | NLS-ZFP-SV40 |
| | GGCAAGATCATGTACGTGGGCGACGTGCGCAGCGTGACACAGAAGCACAT | NLS-KRAB |
| | CCAGGAGTGGGGACCCTTCGACCTGGTCATCGGAGGCAGCCCCTGTAATG | (DNA sequence) |
| | ACCTGTCCATCGTGAACCCTGCAAGGAAGGGCCTGTATGAGGGAACCGGC | |
| | AGACTGTTCTTTGAGTTCTACAGGCTGCTGCACGACGCCCGCCCTAAGGAG | |
| | GGCGATGACAGGCCATTCTTTTGGCTGTTTGAGAACGTGGTGGCCATGGGC | |
| | GTGAGCGACAAGCGGGATATCTCCAGATTCCTGGAGTCTAATCCCGTGATG | |
| | ATCGATGCAAAGGAGGTGTCTGCCGCACACAGGGCAAGGTACTTTTGGGG | |
| | AAATCTGCCTGGCATGAACCGCCCACTGGCCAGCACCGTGAACGACAAGC | |
| | TGGAGCTGCAGGAGTGCCTGGAGCACGGAAGGATCGCCAAGTTCTCCAAG | |
| | GTGCGGACAATCACCACAAGATCTAACAGCATCAAGCAGGGCAAGGATCA | |
| | GCACTTCCCCGTGTTCATGAATGAGAAGGAGGACATCCTGTGGTGTACCGA | |
| | GATGGAGCGCGTGTTCGGCTTTCCAGTGCACTATACAGACGTGAGCAATAT | |
| | GAGCCGGCTGGCAAGGCAGAGACTGCTGGGCCGGTCCTGGTCTGTGCCAG | |
| | TGATCAGACACCTGTTCGCCCCCCTGAAGGAGTACTTTGCCTGCGTGTCTA | |
| | GCGGCAACTCTAATGCCAACAGCAGAGGCCCTTCCTTTTCCTCTGGCCTGG | |
| | TGCCACTGTCTCTGAGGGGCAGCCACATGGGCCCCATGGAGATCTACAAG | |
| | ACCGTGTCCGCCTGGAAGAGGCAGCCTGTGCGCGTGCTGTCTCTGTTCCGC | |
| | AACATCGACAAGGTGCTGAAGAGCCTGGGCTTTCTGGAGAGCGGATCCGG | |
| | ATCTGGAGGAGGCACCCTGAAGTATGTGGAGGATGTGACAAATGTGGTGC | |
| | GGAGAGATGTGGAGAAGTGGGGCCCCTTCGATCTGGTGTACGGATCCACC | |
| | CAGCCACTGGGAAGCTCCTGCGATAGGTGTCCAGGATGGTATATGTTCCAG | |
| | TTTCACAGAATCCTGCAGTACGCACTGCCAAGGCAGGAGAGCCAGCGCCC | |
| | TTTCTTTTGGATCTTTATGGACAACCTGCTGCTGACAGAGGATGACCAGGA | |
| | GACAACAACCCGCTTCCTGCAGACAGAGGCAGTGACCCTGCAGGATGTGA | |
| | GGGGACGCGACTATCAGAATGCCATGCGGGTGTGGTCTAACATCCCTGGC | |
| | CTGAAGAGCAAGCACGCCCCCCTGACCCCTAAGGAGGAGGAGTACCTGCA | |
| | GGCCCAGGTGCGGAGCAGATCCAAGCTGGATGCCCCTAAGGTGGACCTGC | |
| | TGGTGAAGAATTGTCTGCTGCCACTGCGGGAGTACTTCAAGTACTTTAGTC | |
| | AGAATAGCCTGCCACTGGGTGGACCTAGCTCTGGAGCCCCGCCTCCGTCAG | |
| | GTGGATCTCCTGCAGGTAGCCCAACTTCCACGGAAGAGGGCACGTCTGAG | |
| | AGTGCGACTCCTGAGAGCGGGCCTGGCACAAGTACTGAGCCCAGCGAAGG | |
| | TTCTGCACCCGGGTCTCCAGCTGGGAGCCCTACCTCAACAGAGGAAGGTAC | |
| | CAGCACAGAGCCTTCTGAGGGTAGCGCTCCTGGCACGTCCACCGAACCGTC | |
| | CGAGGGGATGGCACCGAAGAAAAAACGCAAAGTTGGTCGAGCGGCGATG | |
| | GCAGAACGCCCGTTCCAATGCAGAATATGTATGAGAAACTTCTCCCAGAG | |
| | CGGAAATCTGGCACGCCACATCCGGACACACACGGGAGAGAAGCCATTTG | |
| | CTTGTGACATTTGTGGTCGCAAATTTGCCGCCACCTGTTGTCTGGCACATCA | |
| | TACTAAGATACATACGGGGTCACAGAAACCATTCCAATGTAGGATCTGCAT | |
| | GCGGAATTTTTCTCGGTGGCAGTATTTGCCTACGCATATTAGAACCCACGC | |
| | CGGTGAGAAACCGTTTGCATGTGACATCTGCGGACGAAAGTTTGCCGATA | |
| | GATCTGCGCTTGCTAGGCATACTAAAATCCACACGGGGTCCCAGAAGCCTT | |
| | TTCAGTGTCGGATATGTATGAGGAACTTCAGTCGATCAGACAACCTTAGCG | |
| | AGCATATTCGGACGCATACTGGAGAAAAACCTTTTGCTTGTGATATATGCG | |
| | GTAGGAAGTTCGCCAAACGGTGTAACCTTCGCTGTCACACCAAAATACATC | |
| | TTCGCCAGAAAGATGCGGCCCGGGCTCCGGACCGAAAAAAAAGAGAAAG | |
| | GTAAACGGCGGGGGAGGATCACGGACCCTGGTTACATTTAAGGACGTTTTT | |
| | GTAGACTTCACGAGGGAGGAATGGAAGCTGTTGGACACCGCCCAGCAAAT | |
| | CGTGTATCGAAATGTAATGTTGGAAAATTATAAAAATCTGGTTTCCCTCGG | |
| | CTACCAATTGACAAAACCAGACGTCATCCTCAGACTGGAAAAAGGGGAAG | |
| | AACCTTGGCTTGTCTGA | |
| 979 | ATGCACGATCAGGAGTTTGACCCCCCTAAGGTGTACCCACCCGTGCCAGCC | 3xFLAG- |
| | GAGAAGAGGAAGCCCATCCGCGTGCTGTCCCTGTTCGACGGCATCGCCAC | DNMT3AL- |
| | AGGCCTGCTGGTGCTGAAGGATCTGGGCATCCAGGTGGACAGATATATCG | XTEN80-SV40 |
| | CCTCCGAGGTGTGCGAGGATTCTATCACCGTGGGCATGGTGAGGCACCAG | NLS-ZFP-SV40 |
| | GGCAAGATCATGTACGTGGGCGACGTGCGCAGCGTGACACAGAAGCACAT | NLS-KRAB |
| | CCAGGAGTGGGGACCCTTCGACCTGGTCATCGGAGGCAGCCCCTGTAATG | (DNA sequence) |
| | ACCTGTCCATCGTGAACCCTGCAAGGAAGGGCCTGTATGAGGGAACCGGC | |
| | AGACTGTTCTTTGAGTTCTACAGGCTGCTGCACGACGCCCGCCCTAAGGAG | |
| | GGCGATGACAGGCCATTCTTTTGGCTGTTTGAGAACGTGGTGGCCATGGGC | |
| | GTGAGCGACAAGCGGGATATCTCCAGATTCCTGGAGTCTAATCCCGTGATG | |
| | ATCGATGCAAAGGAGGTGTCTGCCGCACACAGGGCAAGGTACTTTTGGGG | |
| | AAATCTGCCTGGCATGAACCGCCCACTGGCCAGCACCGTGAACGACAAGC | |
| | TGGAGCTGCAGGAGTGCCTGGAGCACGGAAGGATCGCCAAGTTCTCCAAG | |
| | GTGCGGACAATCACCACAAGATCTAACAGCATCAAGCAGGGCAAGGATCA | |
| | GCACTTCCCCGTGTTCATGAATGAGAAGGAGGACATCCTGTGGTGTACCGA | |
| | GATGGAGCGCGTGTTCGGCTTTCCAGTGCACTATACAGACGTGAGCAATAT | |
| | GAGCCGGCTGGCAAGGCAGAGACTGCTGGGCCGGTCCTGGTCTGTGCCAG | |
| | TGATCAGACACCTGTTCGCCCCCCTGAAGGAGTACTTTGCCTGCGTGTCTA | |
| | GCGGCAACTCTAATGCCAACAGCAGAGGCCCTTCCTTTTCCTCTGGCCTGG | |
| | TGCCACTGTCTCTGAGGGGCAGCCACATGGGCCCCATGGAGATCTACAAG | |
| | ACCGTGTCCGCCTGGAAGAGGCAGCCTGTGCGCGTGCTGTCTCTGTTCCGC | |
| | AACATCGACAAGGTGCTGAAGAGCCTGGGCTTTCTGGAGAGCGGATCCGG | |
| | ATCTGGAGGAGGCACCCTGAAGTATGTGGAGGATGTGACAAATGTGGTGC | |
| | GGAGAGATGTGGAGAAGTGGGGCCCCTTCGATCTGGTGTACGGATCCACC | |
| | CAGCCACTGGGAAGCTCCTGCGATAGGTGTCCAGGATGGTATATGTTCCAG | |
| | TTTCACAGAATCCTGCAGTACGCACTGCCAAGGCAGGAGAGCCAGCGCCC | |
| | TTTCTTTTGGATCTTTATGGACAACCTGCTGCTGACAGAGGATGACCAGGA | |
| | GACAACAACCCGCTTCCTGCAGACAGAGGCAGTGACCCTGCAGGATGTGA | |
| | GGGGACGCGACTATCAGAATGCCATGCGGGTGTGGTCTAACATCCCTGGC | |
| | CTGAAGAGCAAGCACGCCCCCCTGACCCCTAAGGAGGAGGAGTACCTGCA | |
| | GGCCCAGGTGCGGAGCAGATCCAAGCTGGATGCCCCTAAGGTGGACCTGC | |
| | TGGTGAAGAATTGTCTGCTGCCACTGCGGGAGTACTTCAAGTACTTTAGTC | |
| | AGAATAGCCTGCCACTGGGTGGACCTAGCTCTGGAGCCCCGCCTCCGTCAG | |
| | GTGGATCTCCTGCAGGTAGCCCAACTTCCACGGAAGAGGGCACGTCTGAG | |
| | AGTGCGACTCCTGAGAGCGGGCCTGGCACAAGTACTGAGCCCAGCGAAGG | |
| | TTCTGCACCCGGGTCTCCAGCTGGGAGCCCTACCTCAACAGAGGAAGGTAC | |
| | CAGCACAGAGCCTTCTGAGGGTAGCGCTCCTGGCACGTCCACCGAACCGTC | |
| | CGAGGGGATGGCACCGAAGAAAAAACGCAAAGTTGGTCGAGCCGCTATGG | |
| | CTGAAAGACCATTCCAGTGCAGAATATGTATGAGGAATTTTTCTAATCCCG | |
| | CGAACCTTACGCGCCATATCAGGACGCACACGGGCGAAAAGCCCTTCGCC | |
| | TGCGACATTTGTGGGAGAAAGTTTGCTCAAAACGCGACCAGGACAAAGCA | |
| | CACGAAAATTCACACTGGTAGCCAGAAGCCGTTCCAGTGTAGGATCTGTAT | |
| | GCGCAATTTCTCTCAGTCCGGGCACCTCGCGCGACACATAAGAACTCATAC | |
| | GGGGGAGAAGCCGTTTGCATGTGACATCTGCGGCCGCAAGTTTGCGAATA | |
| | GGCATGACAGGGCAAAACATACGAAGATCCATACAGGTTCTCAAAAACCT | |
| | TTCCAATGTCGAATATGCATGCGCAACTTTAGTCGGTCAGACCACCTTTCT | |
| | GAACACATCAGGACACACACTGGCGAAAAGCCGTTCGCATGTGACATTTG | |
| | CGGCAGAAAGTTCGCACAAAGACGGTCCCGCTATAAGCACACCAAAATTC | |
| | ACCTTAGGCAAAAGGATGCAGCTCGGGCTCCGGACCGAAAAAAAAGAGA | |
| | AAGGTAAACGGCGGGGGAGGATCACGGACCCTGGTTACATTTAAGGACGT | |
| | TTTTGTAGACTTCACGAGGGAGGAATGGAAGCTGTTGGACACCGCCCAGC | |
| | AAATCGTGTATCGAAATGTAATGTTGGAAAATTATAAAAATCTGGTTTCCC | |
| | TCGGCTACCAATTGACAAAACCAGACGTCATCCTCAGACTGGAAAAAGGG | |
| | GAAGAACCTTGGCTTGTCTGA | |
| 980 | ATGCACGATCAGGAGTTTGACCCCCCTAAGGTGTACCCACCCGTGCCAGCC | 3xFLAG- |
| | GAGAAGAGGAAGCCCATCCGCGTGCTGTCCCTGTTCGACGGCATCGCCAC | DNMT3AL- |
| | AGGCCTGCTGGTGCTGAAGGATCTGGGCATCCAGGTGGACAGATATATCG | XTEN80-SV40 |
| | CCTCCGAGGTGTGCGAGGATTCTATCACCGTGGGCATGGTGAGGCACCAG | NLS-ZFP-SV40 |
| | GGCAAGATCATGTACGTGGGCGACGTGCGCAGCGTGACACAGAAGCACAT | NLS-KRAB |
| | CCAGGAGTGGGGACCCTTCGACCTGGTCATCGGAGGCAGCCCCTGTAATG | (DNA sequence) |
| | ACCTGTCCATCGTGAACCCTGCAAGGAAGGGCCTGTATGAGGGAACCGGC | |
| | AGACTGTTCTTTGAGTTCTACAGGCTGCTGCACGACGCCCGCCCTAAGGAG | |
| | GGCGATGACAGGCCATTCTTTTGGCTGTTTGAGAACGTGGTGGCCATGGGC | |
| | GTGAGCGACAAGCGGGATATCTCCAGATTCCTGGAGTCTAATCCCGTGATG | |
| | ATCGATGCAAAGGAGGTGTCTGCCGCACACAGGGCAAGGTACTTTTGGGG | |
| | AAATCTGCCTGGCATGAACCGCCCACTGGCCAGCACCGTGAACGACAAGC | |
| | TGGAGCTGCAGGAGTGCCTGGAGCACGGAAGGATCGCCAAGTTCTCCAAG | |
| | GTGCGGACAATCACCACAAGATCTAACAGCATCAAGCAGGGCAAGGATCA | |
| | GCACTTCCCCGTGTTCATGAATGAGAAGGAGGACATCCTGTGGTGTACCGA | |
| | GATGGAGCGCGTGTTCGGCTTTCCAGTGCACTATACAGACGTGAGCAATAT | |
| | GAGCCGGCTGGCAAGGCAGAGACTGCTGGGCCGGTCCTGGTCTGTGCCAG | |
| | TGATCAGACACCTGTTCGCCCCCCTGAAGGAGTACTTTGCCTGCGTGTCTA | |
| | GCGGCAACTCTAATGCCAACAGCAGAGGCCCTTCCTTTTCCTCTGGCCTGG | |
| | TGCCACTGTCTCTGAGGGGCAGCCACATGGGCCCCATGGAGATCTACAAG | |
| | ACCGTGTCCGCCTGGAAGAGGCAGCCTGTGCGCGTGCTGTCTCTGTTCCGC | |
| | AACATCGACAAGGTGCTGAAGAGCCTGGGCTTTCTGGAGAGCGGATCCGG | |
| | ATCTGGAGGAGGCACCCTGAAGTATGTGGAGGATGTGACAAATGTGGTGC | |
| | GGAGAGATGTGGAGAAGTGGGGCCCCTTCGATCTGGTGTACGGATCCACC | |
| | CAGCCACTGGGAAGCTCCTGCGATAGGTGTCCAGGATGGTATATGTTCCAG | |
| | TTTCACAGAATCCTGCAGTACGCACTGCCAAGGCAGGAGAGCCAGCGCCC | |
| | TTTCTTTTGGATCTTTATGGACAACCTGCTGCTGACAGAGGATGACCAGGA | |
| | GACAACAACCCGCTTCCTGCAGACAGAGGCAGTGACCCTGCAGGATGTGA | |
| | GGGGACGCGACTATCAGAATGCCATGCGGGTGTGGTCTAACATCCCTGGC | |
| | CTGAAGAGCAAGCACGCCCCCCTGACCCCTAAGGAGGAGGAGTACCTGCA | |
| | GGCCCAGGTGCGGAGCAGATCCAAGCTGGATGCCCCTAAGGTGGACCTGC | |
| | TGGTGAAGAATTGTCTGCTGCCACTGCGGGAGTACTTCAAGTACTTTAGTC | |
| | AGAATAGCCTGCCACTGGGTGGACCTAGCTCTGGAGCCCCGCCTCCGTCAG | |
| | GTGGATCTCCTGCAGGTAGCCCAACTTCCACGGAAGAGGGCACGTCTGAG | |
| | AGTGCGACTCCTGAGAGCGGGCCTGGCACAAGTACTGAGCCCAGCGAAGG | |
| | TTCTGCACCCGGGTCTCCAGCTGGGAGCCCTACCTCAACAGAGGAAGGTAC | |
| | CAGCACAGAGCCTTCTGAGGGTAGCGCTCCTGGCACGTCCACCGAACCGTC | |
| | CGAGGGGATGGCACCGAAGAAAAAACGCAAAGTTGGTCGAGCGGCAATG | |
| | GCAGAACGACCCTTCCAATGCCGCATATGTATGCGAAACTTCAGCCAGAG | |
| | CTCAGATCTTTCCAGACACATCAGGACTCACACTGGCGAAAAACCATTTGC | |
| | ATGCGATATATGCGGGAGAAAATTCGCGCACCGCAGTACGCGAAACAGGC | |
| | ATACAAAGATACATACTGGCAGTCAAAAGCCATTTCAATGTCGAATATGC | |
| | ATGAGGAACTTTAGTCGATCTGACGTGCTGAGCGCTCACATACGGACCCAT | |
| | ACCGGAGAGAAACCATTCGCTTGTGACATCTGTGGTAGGAAGTTCGCGGA | |
| | TTCCCGGACCCGCAAAAATCATACTAAAATTCACACTGGGTCTCAGAAGCC | |
| | CTTTCAGTGTAGGATATGTATGCGCAATTTTAGCCAGAGTGGTTCATTGAC | |
| | TCGGCATATCAGAACACATACTGGAGAGAAACCTTTCGCGTGTGATATTTG | |
| | CGGTCGAAAGTTCGCAGATCAGAGTGGACTTGCGCACCATACTAAGATCC | |
| | ACCTGAGACAGAAGGACGCTGCGCGGGCTCCGGACCGAAAAAAAAGAGA | |
| | AAGGTAAACGGCGGGGGAGGATCACGGACCCTGGTTACATTTAAGGACGT | |
| | TTTTGTAGACTTCACGAGGGAGGAATGGAAGCTGTTGGACACCGCCCAGC | |
| | AAATCGTGTATCGAAATGTAATGTTGGAAAATTATAAAAATCTGGTTTCCC | |
| | TCGGCTACCAATTGACAAAACCAGACGTCATCCTCAGACTGGAAAAAGGG | |
| | GAAGAACCTTGGCTTGTCTGA | |
| 981 | ATGCACGATCAGGAGTTTGACCCCCCTAAGGTGTACCCACCCGTGCCAGCC | 3xFLAG- |
| | GAGAAGAGGAAGCCCATCCGCGTGCTGTCCCTGTTCGACGGCATCGCCAC | DNMT3AL- |
| | AGGCCTGCTGGTGCTGAAGGATCTGGGCATCCAGGTGGACAGATATATCG | XTEN80-SV40 |
| | CCTCCGAGGTGTGCGAGGATTCTATCACCGTGGGCATGGTGAGGCACCAG | NLS-ZFP-SV40 |
| | GGCAAGATCATGTACGTGGGCGACGTGCGCAGCGTGACACAGAAGCACAT | NLS-KRAB |
| | CCAGGAGTGGGGACCCTTCGACCTGGTCATCGGAGGCAGCCCCTGTAATG | (DNA sequence) |
| | ACCTGTCCATCGTGAACCCTGCAAGGAAGGGCCTGTATGAGGGAACCGGC | |
| | AGACTGTTCTTTGAGTTCTACAGGCTGCTGCACGACGCCCGCCCTAAGGAG | |
| | GGCGATGACAGGCCATTCTTTTGGCTGTTTGAGAACGTGGTGGCCATGGGC | |
| | GTGAGCGACAAGCGGGATATCTCCAGATTCCTGGAGTCTAATCCCGTGATG | |
| | ATCGATGCAAAGGAGGTGTCTGCCGCACACAGGGCAAGGTACTTTTGGGG | |
| | AAATCTGCCTGGCATGAACCGCCCACTGGCCAGCACCGTGAACGACAAGC | |
| | TGGAGCTGCAGGAGTGCCTGGAGCACGGAAGGATCGCCAAGTTCTCCAAG | |
| | GTGCGGACAATCACCACAAGATCTAACAGCATCAAGCAGGGCAAGGATCA | |
| | GCACTTCCCCGTGTTCATGAATGAGAAGGAGGACATCCTGTGGTGTACCGA | |
| | GATGGAGCGCGTGTTCGGCTTTCCAGTGCACTATACAGACGTGAGCAATAT | |
| | GAGCCGGCTGGCAAGGCAGAGACTGCTGGGCCGGTCCTGGTCTGTGCCAG | |
| | TGATCAGACACCTGTTCGCCCCCCTGAAGGAGTACTTTGCCTGCGTGTCTA | |
| | GCGGCAACTCTAATGCCAACAGCAGAGGCCCTTCCTTTTCCTCTGGCCTGG | |
| | TGCCACTGTCTCTGAGGGGCAGCCACATGGGCCCCATGGAGATCTACAAG | |
| | ACCGTGTCCGCCTGGAAGAGGCAGCCTGTGCGCGTGCTGTCTCTGTTCCGC | |
| | AACATCGACAAGGTGCTGAAGAGCCTGGGCTTTCTGGAGAGCGGATCCGG | |
| | ATCTGGAGGAGGCACCCTGAAGTATGTGGAGGATGTGACAAATGTGGTGC | |
| | GGAGAGATGTGGAGAAGTGGGGCCCCTTCGATCTGGTGTACGGATCCACC | |
| | CAGCCACTGGGAAGCTCCTGCGATAGGTGTCCAGGATGGTATATGTTCCAG | |
| | TTTCACAGAATCCTGCAGTACGCACTGCCAAGGCAGGAGAGCCAGCGCCC | |
| | TTTCTTTTGGATCTTTATGGACAACCTGCTGCTGACAGAGGATGACCAGGA | |
| | GACAACAACCCGCTTCCTGCAGACAGAGGCAGTGACCCTGCAGGATGTGA | |
| | GGGGACGCGACTATCAGAATGCCATGCGGGTGTGGTCTAACATCCCTGGC | |
| | CTGAAGAGCAAGCACGCCCCCCTGACCCCTAAGGAGGAGGAGTACCTGCA | |
| | GGCCCAGGTGCGGAGCAGATCCAAGCTGGATGCCCCTAAGGTGGACCTGC | |
| | TGGTGAAGAATTGTCTGCTGCCACTGCGGGAGTACTTCAAGTACTTTAGTC | |
| | AGAATAGCCTGCCACTGGGTGGACCTAGCTCTGGAGCCCCGCCTCCGTCAG | |
| | GTGGATCTCCTGCAGGTAGCCCAACTTCCACGGAAGAGGGCACGTCTGAG | |
| | AGTGCGACTCCTGAGAGCGGGCCTGGCACAAGTACTGAGCCCAGCGAAGG | |
| | TTCTGCACCCGGGTCTCCAGCTGGGAGCCCTACCTCAACAGAGGAAGGTAC | |
| | CAGCACAGAGCCTTCTGAGGGTAGCGCTCCTGGCACGTCCACCGAACCGTC | |
| | CGAGGGGATGGCACCGAAGAAAAAACGCAAAGTTGGTCGAGCTGCCATGG | |
| | CGGAGCGCCCTTTCCAGTGTAGGATATGTATGCGCAACTTCAGTCAGAACC | |
| | CAGCCCAGTGGCGGCACATACGGACGCATACTGGAGAAAAGCCATTTGCA | |
| | TGTGATATCTGCGGGCGAAAATTCGCGCGGTCAGCAGATTTGAGCCGGCAT | |
| | ACGAAGATCCATACAGGTTCACAAAAGCCATTTCAATGTCGGATATGTATG | |
| | CGGAACTTCAGCACGTCCGGCTCATTGTCAAGACATATACGAACTCATACC | |
| | GGAGAGAAACCCTTCGCGTGCGACATTTGCGGTCGGAAGTTCGCGCGATC | |
| | CGACCATCTGTCACGACATACGAAAATACACACTGGCTCTCAAAAGCCGTT | |
| | TCAGTGCAGAATTTGCATGAGAAATTTTAGCAGGAGCGACTCACTCCTTCG | |
| | GCATATACGAACACACACTGGTGAGAAGCCATTTGCCTGTGATATTTGTGG | |
| | ACGAAAGTTTGCGCAATCTTACGATAGGTTTCAGCATACAAAAATCCACCT | |
| | TCGGCAAAAGGACGCGGCACGGGCTCCGGACCGAAAAAAAAGAGAAAGG | |
| | TAAACGGCGGGGGAGGATCACGGACCCTGGTTACATTTAAGGACGTTTTTG | |
| | TAGACTTCACGAGGGAGGAATGGAAGCTGTTGGACACCGCCCAGCAAATC | |
| | GTGTATCGAAATGTAATGTTGGAAAATTATAAAAATCTGGTTTCCCTCGGC | |
| | TACCAATTGACAAAACCAGACGTCATCCTCAGACTGGAAAAAGGGGAAGA | |
| | ACCTTGGCTTGTCTGA | |
| 982 | ATGCACGATCAGGAGTTTGACCCCCCTAAGGTGTACCCACCCGTGCCAGCC | 3xFLAG- |
| | GAGAAGAGGAAGCCCATCCGCGTGCTGTCCCTGTTCGACGGCATCGCCAC | DNMT3AL- |
| | AGGCCTGCTGGTGCTGAAGGATCTGGGCATCCAGGTGGACAGATATATCG | XTEN80-SV40 |
| | CCTCCGAGGTGTGCGAGGATTCTATCACCGTGGGCATGGTGAGGCACCAG | NLS-ZFP-SV40 |
| | GGCAAGATCATGTACGTGGGCGACGTGCGCAGCGTGACACAGAAGCACAT | NLS-KRAB |
| | CCAGGAGTGGGGACCCTTCGACCTGGTCATCGGAGGCAGCCCCTGTAATG | (DNA sequence) |
| | ACCTGTCCATCGTGAACCCTGCAAGGAAGGGCCTGTATGAGGGAACCGGC | |
| | AGACTGTTCTTTGAGTTCTACAGGCTGCTGCACGACGCCCGCCCTAAGGAG | |
| | GGCGATGACAGGCCATTCTTTTGGCTGTTTGAGAACGTGGTGGCCATGGGC | |
| | GTGAGCGACAAGCGGGATATCTCCAGATTCCTGGAGTCTAATCCCGTGATG | |
| | ATCGATGCAAAGGAGGTGTCTGCCGCACACAGGGCAAGGTACTTTTGGGG | |
| | AAATCTGCCTGGCATGAACCGCCCACTGGCCAGCACCGTGAACGACAAGC | |
| | TGGAGCTGCAGGAGTGCCTGGAGCACGGAAGGATCGCCAAGTTCTCCAAG | |
| | GTGCGGACAATCACCACAAGATCTAACAGCATCAAGCAGGGCAAGGATCA | |
| | GCACTTCCCCGTGTTCATGAATGAGAAGGAGGACATCCTGTGGTGTACCGA | |
| | GATGGAGCGCGTGTTCGGCTTTCCAGTGCACTATACAGACGTGAGCAATAT | |
| | GAGCCGGCTGGCAAGGCAGAGACTGCTGGGCCGGTCCTGGTCTGTGCCAG | |
| | TGATCAGACACCTGTTCGCCCCCCTGAAGGAGTACTTTGCCTGCGTGTCTA | |
| | GCGGCAACTCTAATGCCAACAGCAGAGGCCCTTCCTTTTCCTCTGGCCTGG | |
| | TGCCACTGTCTCTGAGGGGCAGCCACATGGGCCCCATGGAGATCTACAAG | |
| | ACCGTGTCCGCCTGGAAGAGGCAGCCTGTGCGCGTGCTGTCTCTGTTCCGC | |
| | AACATCGACAAGGTGCTGAAGAGCCTGGGCTTTCTGGAGAGCGGATCCGG | |
| | ATCTGGAGGAGGCACCCTGAAGTATGTGGAGGATGTGACAAATGTGGTGC | |
| | GGAGAGATGTGGAGAAGTGGGGCCCCTTCGATCTGGTGTACGGATCCACC | |
| | CAGCCACTGGGAAGCTCCTGCGATAGGTGTCCAGGATGGTATATGTTCCAG | |
| | TTTCACAGAATCCTGCAGTACGCACTGCCAAGGCAGGAGAGCCAGCGCCC | |
| | TTTCTTTTGGATCTTTATGGACAACCTGCTGCTGACAGAGGATGACCAGGA | |
| | GACAACAACCCGCTTCCTGCAGACAGAGGCAGTGACCCTGCAGGATGTGA | |
| | GGGGACGCGACTATCAGAATGCCATGCGGGTGTGGTCTAACATCCCTGGC | |
| | CTGAAGAGCAAGCACGCCCCCCTGACCCCTAAGGAGGAGGAGTACCTGCA | |
| | GGCCCAGGTGCGGAGCAGATCCAAGCTGGATGCCCCTAAGGTGGACCTGC | |
| | TGGTGAAGAATTGTCTGCTGCCACTGCGGGAGTACTTCAAGTACTTTAGTC | |
| | AGAATAGCCTGCCACTGGGTGGACCTAGCTCTGGAGCCCCGCCTCCGTCAG | |
| | GTGGATCTCCTGCAGGTAGCCCAACTTCCACGGAAGAGGGCACGTCTGAG | |
| | AGTGCGACTCCTGAGAGCGGGCCTGGCACAAGTACTGAGCCCAGCGAAGG | |
| | TTCTGCACCCGGGTCTCCAGCTGGGAGCCCTACCTCAACAGAGGAAGGTAC | |
| | CAGCACAGAGCCTTCTGAGGGTAGCGCTCCTGGCACGTCCACCGAACCGTC | |
| | CGAGGGGATGGCACCGAAGAAAAAACGCAAAGTTGGTCGAGCTGCCATGG | |
| | CTGAACGACCGTTTCAATGTCGAATTTGCATGCGCAACTTCTCCACGTCCG | |
| | GGTCTCTCAGTAGACACATCAGAACGCATACTGGTGAAAAACCATTCGCTT | |
| | GTGACATATGCGGCCGAAAATTCGCGCGGAGCGACCACCTGTCACGGCAT | |
| | ACCAAAATTCACACCGGGAGTCAAAAACCGTTCCAGTGTAGGATATGTAT | |
| | GCGCAACTTCAGCCGGTCTGACAGTCTGCTTCGACATATTCGGACGCACAC | |
| | TGGTGAAAAGCCGTTTGCGTGCGACATTTGTGGTCGAAAGTTCGCTCAATC | |
| | TTATGATAGGTTTCAACACACCAAAATACATACGGGCTCCCAGAAGCCGTT | |
| | CCAGTGCAGAATATGCATGAGAAATTTCTCTCGCAGTGACAATTTGTCCAC | |
| | CCATATTCGAACGCACACCGGCGAGAAACCCTTCGCCTGCGATATTTGCGG | |
| | TCGCAAGTTCGCAGACAACAGGGATAGGATAAAACATACGAAGATCCATC | |
| | TGAGGCAAAAAGACGCCGCCCGGGCTCCGGACCGAAAAAAAAGAGAAAG | |
| | GTAAACGGCGGGGGAGGATCACGGACCCTGGTTACATTTAAGGACGTTTTT | |
| | GTAGACTTCACGAGGGAGGAATGGAAGCTGTTGGACACCGCCCAGCAAAT | |
| | CGTGTATCGAAATGTAATGTTGGAAAATTATAAAAATCTGGTTTCCCTCGG | |
| | CTACCAATTGACAAAACCAGACGTCATCCTCAGACTGGAAAAAGGGGAAG | |
| | AACCTTGGCTTGTCTGA | |
| 983 | ATGCACGATCAGGAGTTTGACCCCCCTAAGGTGTACCCACCCGTGCCAGCC | 3xFLAG- |
| | GAGAAGAGGAAGCCCATCCGCGTGCTGTCCCTGTTCGACGGCATCGCCAC | DNMT3AL- |
| | AGGCCTGCTGGTGCTGAAGGATCTGGGCATCCAGGTGGACAGATATATCG | XTEN80-SV40 |
| | CCTCCGAGGTGTGCGAGGATTCTATCACCGTGGGCATGGTGAGGCACCAG | NLS-ZFP-SV40 |
| | GGCAAGATCATGTACGTGGGCGACGTGCGCAGCGTGACACAGAAGCACAT | NLS-KRAB |
| | CCAGGAGTGGGGACCCTTCGACCTGGTCATCGGAGGCAGCCCCTGTAATG | (DNA sequence) |
| | ACCTGTCCATCGTGAACCCTGCAAGGAAGGGCCTGTATGAGGGAACCGGC | |
| | AGACTGTTCTTTGAGTTCTACAGGCTGCTGCACGACGCCCGCCCTAAGGAG | |
| | GGCGATGACAGGCCATTCTTTTGGCTGTTTGAGAACGTGGTGGCCATGGGC | |
| | GTGAGCGACAAGCGGGATATCTCCAGATTCCTGGAGTCTAATCCCGTGATG | |
| | ATCGATGCAAAGGAGGTGTCTGCCGCACACAGGGCAAGGTACTTTTGGGG | |
| | AAATCTGCCTGGCATGAACCGCCCACTGGCCAGCACCGTGAACGACAAGC | |
| | TGGAGCTGCAGGAGTGCCTGGAGCACGGAAGGATCGCCAAGTTCTCCAAG | |
| | GTGCGGACAATCACCACAAGATCTAACAGCATCAAGCAGGGCAAGGATCA | |
| | GCACTTCCCCGTGTTCATGAATGAGAAGGAGGACATCCTGTGGTGTACCGA | |
| | GATGGAGCGCGTGTTCGGCTTTCCAGTGCACTATACAGACGTGAGCAATAT | |
| | GAGCCGGCTGGCAAGGCAGAGACTGCTGGGCCGGTCCTGGTCTGTGCCAG | |
| | TGATCAGACACCTGTTCGCCCCCCTGAAGGAGTACTTTGCCTGCGTGTCTA | |
| | GCGGCAACTCTAATGCCAACAGCAGAGGCCCTTCCTTTTCCTCTGGCCTGG | |
| | TGCCACTGTCTCTGAGGGGCAGCCACATGGGCCCCATGGAGATCTACAAG | |
| | ACCGTGTCCGCCTGGAAGAGGCAGCCTGTGCGCGTGCTGTCTCTGTTCCGC | |
| | AACATCGACAAGGTGCTGAAGAGCCTGGGCTTTCTGGAGAGCGGATCCGG | |
| | ATCTGGAGGAGGCACCCTGAAGTATGTGGAGGATGTGACAAATGTGGTGC | |
| | GGAGAGATGTGGAGAAGTGGGGCCCCTTCGATCTGGTGTACGGATCCACC | |
| | CAGCCACTGGGAAGCTCCTGCGATAGGTGTCCAGGATGGTATATGTTCCAG | |
| | TTTCACAGAATCCTGCAGTACGCACTGCCAAGGCAGGAGAGCCAGCGCCC | |
| | TTTCTTTTGGATCTTTATGGACAACCTGCTGCTGACAGAGGATGACCAGGA | |
| | GACAACAACCCGCTTCCTGCAGACAGAGGCAGTGACCCTGCAGGATGTGA | |
| | GGGGACGCGACTATCAGAATGCCATGCGGGTGTGGTCTAACATCCCTGGC | |
| | CTGAAGAGCAAGCACGCCCCCCTGACCCCTAAGGAGGAGGAGTACCTGCA | |
| | GGCCCAGGTGCGGAGCAGATCCAAGCTGGATGCCCCTAAGGTGGACCTGC | |
| | TGGTGAAGAATTGTCTGCTGCCACTGCGGGAGTACTTCAAGTACTTTAGTC | |
| | AGAATAGCCTGCCACTGGGTGGACCTAGCTCTGGAGCCCCGCCTCCGTCAG | |
| | GTGGATCTCCTGCAGGTAGCCCAACTTCCACGGAAGAGGGCACGTCTGAG | |
| | AGTGCGACTCCTGAGAGCGGGCCTGGCACAAGTACTGAGCCCAGCGAAGG | |
| | TTCTGCACCCGGGTCTCCAGCTGGGAGCCCTACCTCAACAGAGGAAGGTAC | |
| | CAGCACAGAGCCTTCTGAGGGTAGCGCTCCTGGCACGTCCACCGAACCGTC | |
| | CGAGGGGATGGCACCGAAGAAAAAACGCAAAGTTGGTCGAGCAGCCATG | |
| | GCAGAGCGGCCATTCCAGTGCAGAATCTGCATGCGGAACTTTTCCGATAGG | |
| | TCCAATCTGTCACGCCATATTAGGACACACACGGGTGAAAAACCGTTCGCG | |
| | TGTGACATATGCGGTCGCAAATTCGCCCTGAGACAGAACCTGATTATGCAC | |
| | ACAAAAATACATACGGGAAGCCAGAAACCGTTCCAGTGTCGGATATGCAT | |
| | GAGGAACTTCAGTGAGAGGGGGACTTTGGCGAGGCACATCAGGACTCACA | |
| | CTGGGGAGAAGCCCTTTGCATGTGATATCTGTGGCCGAAAATTTGCTCGAT | |
| | CAGATGCTCTCACCCAACATACAAAGATCCATACTGGCTCTCAAAAACCGT | |
| | TTCAATGTAGAATTTGTATGCGCAACTTCTCTCGGTCAGATAGCCTGTCCC | |
| | AGCATATCCGAACTCATACAGGTGAGAAACCCTTCGCATGCGACATCTGTG | |
| | GGCGAAAATTTGCTAGAAAAGCAGACCGGACCCGACACACAAAGATTCAT | |
| | CTGCGACAAAAAGACGCCGCCCGGGCTCCGGACCGAAAAAAAAGAGAAA | |
| | GGTAAACGGCGGGGGAGGATCACGGACCCTGGTTACATTTAAGGACGTTT | |
| | TTGTAGACTTCACGAGGGAGGAATGGAAGCTGTTGGACACCGCCCAGCAA | |
| | ATCGTGTATCGAAATGTAATGTTGGAAAATTATAAAAATCTGGTTTCCCTC | |
| | GGCTACCAATTGACAAAACCAGACGTCATCCTCAGACTGGAAAAAGGGGA | |
| | AGAACCTTGGCTTGTCTGA | |
| 984 | ATGCACGATCAGGAGTTTGACCCCCCTAAGGTGTACCCACCCGTGCCAGCC | 3xFLAG- |
| | GAGAAGAGGAAGCCCATCCGCGTGCTGTCCCTGTTCGACGGCATCGCCAC | DNMT3AL- |
| | AGGCCTGCTGGTGCTGAAGGATCTGGGCATCCAGGTGGACAGATATATCG | XTEN80-SV40 |
| | CCTCCGAGGTGTGCGAGGATTCTATCACCGTGGGCATGGTGAGGCACCAG | NLS-ZFP-SV40 |
| | GGCAAGATCATGTACGTGGGCGACGTGCGCAGCGTGACACAGAAGCACAT | NLS-KRAB |
| | CCAGGAGTGGGGACCCTTCGACCTGGTCATCGGAGGCAGCCCCTGTAATG | (DNA sequence) |
| | ACCTGTCCATCGTGAACCCTGCAAGGAAGGGCCTGTATGAGGGAACCGGC | |
| | AGACTGTTCTTTGAGTTCTACAGGCTGCTGCACGACGCCCGCCCTAAGGAG | |
| | GGCGATGACAGGCCATTCTTTTGGCTGTTTGAGAACGTGGTGGCCATGGGC | |
| | GTGAGCGACAAGCGGGATATCTCCAGATTCCTGGAGTCTAATCCCGTGATG | |
| | ATCGATGCAAAGGAGGTGTCTGCCGCACACAGGGCAAGGTACTTTTGGGG | |
| | AAATCTGCCTGGCATGAACCGCCCACTGGCCAGCACCGTGAACGACAAGC | |
| | TGGAGCTGCAGGAGTGCCTGGAGCACGGAAGGATCGCCAAGTTCTCCAAG | |
| | GTGCGGACAATCACCACAAGATCTAACAGCATCAAGCAGGGCAAGGATCA | |
| | GCACTTCCCCGTGTTCATGAATGAGAAGGAGGACATCCTGTGGTGTACCGA | |
| | GATGGAGCGCGTGTTCGGCTTTCCAGTGCACTATACAGACGTGAGCAATAT | |
| | GAGCCGGCTGGCAAGGCAGAGACTGCTGGGCCGGTCCTGGTCTGTGCCAG | |
| | TGATCAGACACCTGTTCGCCCCCCTGAAGGAGTACTTTGCCTGCGTGTCTA | |
| | GCGGCAACTCTAATGCCAACAGCAGAGGCCCTTCCTTTTCCTCTGGCCTGG | |
| | TGCCACTGTCTCTGAGGGGCAGCCACATGGGCCCCATGGAGATCTACAAG | |
| | ACCGTGTCCGCCTGGAAGAGGCAGCCTGTGCGCGTGCTGTCTCTGTTCCGC | |
| | AACATCGACAAGGTGCTGAAGAGCCTGGGCTTTCTGGAGAGCGGATCCGG | |
| | ATCTGGAGGAGGCACCCTGAAGTATGTGGAGGATGTGACAAATGTGGTGC | |
| | GGAGAGATGTGGAGAAGTGGGGCCCCTTCGATCTGGTGTACGGATCCACC | |
| | CAGCCACTGGGAAGCTCCTGCGATAGGTGTCCAGGATGGTATATGTTCCAG | |
| | TTTCACAGAATCCTGCAGTACGCACTGCCAAGGCAGGAGAGCCAGCGCCC | |
| | TTTCTTTTGGATCTTTATGGACAACCTGCTGCTGACAGAGGATGACCAGGA | |
| | GACAACAACCCGCTTCCTGCAGACAGAGGCAGTGACCCTGCAGGATGTGA | |
| | GGGGACGCGACTATCAGAATGCCATGCGGGTGTGGTCTAACATCCCTGGC | |
| | CTGAAGAGCAAGCACGCCCCCCTGACCCCTAAGGAGGAGGAGTACCTGCA | |
| | GGCCCAGGTGCGGAGCAGATCCAAGCTGGATGCCCCTAAGGTGGACCTGC | |
| | TGGTGAAGAATTGTCTGCTGCCACTGCGGGAGTACTTCAAGTACTTTAGTC | |
| | AGAATAGCCTGCCACTGGGTGGACCTAGCTCTGGAGCCCCGCCTCCGTCAG | |
| | GTGGATCTCCTGCAGGTAGCCCAACTTCCACGGAAGAGGGCACGTCTGAG | |
| | AGTGCGACTCCTGAGAGCGGGCCTGGCACAAGTACTGAGCCCAGCGAAGG | |
| | TTCTGCACCCGGGTCTCCAGCTGGGAGCCCTACCTCAACAGAGGAAGGTAC | |
| | CAGCACAGAGCCTTCTGAGGGTAGCGCTCCTGGCACGTCCACCGAACCGTC | |
| | CGAGGGGATGGCACCGAAGAAAAAACGCAAAGTTGGTCGAGCGGCCATG | |
| | GCTGAGAGGCCTTTTCAATGTAGAATATGTATGCGAAATTTTTCACAGTAC | |
| | TGTTGTCTCACGAACCACATAAGGACTCATACAGGGGAGAAACCATTTGCC | |
| | TGTGACATTTGCGGTCGCAAATTTGCTACTTCTGGAAACCTGACTCGGCAC | |
| | ACTAAGATTCACACAGGGTCCCAGAAGCCCTTCCAGTGTCGCATTTGCATG | |
| | AGGAATTTTAGTCAAAGCTCTGACTTGTCAAGGCATATTCGCACGCACACG | |
| | GGCGAAAAGCCGTTCGCTTGCGACATATGCGGGCGGAAATTTGCCTTCCGC | |
| | TATTATTTGAAGAGACACACCAAGATACATACGGGCTCTCAGAAGCCCTTT | |
| | CAGTGTAGGATTTGCATGCGCAATTTTTCACAATCTGGTGATCTCACGCGA | |
| | CACATCCGGACTCACACAGGTGAAAAGCCTTTCGCGTGCGACATTTGCGGC | |
| | CGGAAGTTTGCTGACAAGGGCAACCTCACAAAGCATACGAAGATTCACTT | |
| | GAGGCAGAAAGATGCTGCTCGGGCTCCGGACCGAAAAAAAAGAGAAAGG | |
| | TAAACGGCGGGGGAGGATCACGGACCCTGGTTACATTTAAGGACGTTTTTG | |
| | TAGACTTCACGAGGGAGGAATGGAAGCTGTTGGACACCGCCCAGCAAATC | |
| | GTGTATCGAAATGTAATGTTGGAAAATTATAAAAATCTGGTTTCCCTCGGC | |
| | TACCAATTGACAAAACCAGACGTCATCCTCAGACTGGAAAAAGGGGAAGA | |
| | ACCTTGGCTTGTCTGA | |
| 985 | ATGCACGATCAGGAGTTTGACCCCCCTAAGGTGTACCCACCCGTGCCAGCC | 3xFLAG- |
| | GAGAAGAGGAAGCCCATCCGCGTGCTGTCCCTGTTCGACGGCATCGCCAC | DNMT3AL- |
| | AGGCCTGCTGGTGCTGAAGGATCTGGGCATCCAGGTGGACAGATATATCG | XTEN80-SV40 |
| | CCTCCGAGGTGTGCGAGGATTCTATCACCGTGGGCATGGTGAGGCACCAG | NLS-ZFP-SV40 |
| | GGCAAGATCATGTACGTGGGCGACGTGCGCAGCGTGACACAGAAGCACAT | NLS-KRAB |
| | CCAGGAGTGGGGACCCTTCGACCTGGTCATCGGAGGCAGCCCCTGTAATG | (DNA sequence) |
| | ACCTGTCCATCGTGAACCCTGCAAGGAAGGGCCTGTATGAGGGAACCGGC | |
| | AGACTGTTCTTTGAGTTCTACAGGCTGCTGCACGACGCCCGCCCTAAGGAG | |
| | GGCGATGACAGGCCATTCTTTTGGCTGTTTGAGAACGTGGTGGCCATGGGC | |
| | GTGAGCGACAAGCGGGATATCTCCAGATTCCTGGAGTCTAATCCCGTGATG | |
| | ATCGATGCAAAGGAGGTGTCTGCCGCACACAGGGCAAGGTACTTTTGGGG | |
| | AAATCTGCCTGGCATGAACCGCCCACTGGCCAGCACCGTGAACGACAAGC | |
| | TGGAGCTGCAGGAGTGCCTGGAGCACGGAAGGATCGCCAAGTTCTCCAAG | |
| | GTGCGGACAATCACCACAAGATCTAACAGCATCAAGCAGGGCAAGGATCA | |
| | GCACTTCCCCGTGTTCATGAATGAGAAGGAGGACATCCTGTGGTGTACCGA | |
| | GATGGAGCGCGTGTTCGGCTTTCCAGTGCACTATACAGACGTGAGCAATAT | |
| | GAGCCGGCTGGCAAGGCAGAGACTGCTGGGCCGGTCCTGGTCTGTGCCAG | |
| | TGATCAGACACCTGTTCGCCCCCCTGAAGGAGTACTTTGCCTGCGTGTCTA | |
| | GCGGCAACTCTAATGCCAACAGCAGAGGCCCTTCCTTTTCCTCTGGCCTGG | |
| | TGCCACTGTCTCTGAGGGGCAGCCACATGGGCCCCATGGAGATCTACAAG | |
| | ACCGTGTCCGCCTGGAAGAGGCAGCCTGTGCGCGTGCTGTCTCTGTTCCGC | |
| | AACATCGACAAGGTGCTGAAGAGCCTGGGCTTTCTGGAGAGCGGATCCGG | |
| | ATCTGGAGGAGGCACCCTGAAGTATGTGGAGGATGTGACAAATGTGGTGC | |
| | GGAGAGATGTGGAGAAGTGGGGCCCCTTCGATCTGGTGTACGGATCCACC | |
| | CAGCCACTGGGAAGCTCCTGCGATAGGTGTCCAGGATGGTATATGTTCCAG | |
| | TTTCACAGAATCCTGCAGTACGCACTGCCAAGGCAGGAGAGCCAGCGCCC | |
| | TTTCTTTTGGATCTTTATGGACAACCTGCTGCTGACAGAGGATGACCAGGA | |
| | GACAACAACCCGCTTCCTGCAGACAGAGGCAGTGACCCTGCAGGATGTGA | |
| | GGGGACGCGACTATCAGAATGCCATGCGGGTGTGGTCTAACATCCCTGGC | |
| | CTGAAGAGCAAGCACGCCCCCCTGACCCCTAAGGAGGAGGAGTACCTGCA | |
| | GGCCCAGGTGCGGAGCAGATCCAAGCTGGATGCCCCTAAGGTGGACCTGC | |
| | TGGTGAAGAATTGTCTGCTGCCACTGCGGGAGTACTTCAAGTACTTTAGTC | |
| | AGAATAGCCTGCCACTGGGTGGACCTAGCTCTGGAGCCCCGCCTCCGTCAG | |
| | GTGGATCTCCTGCAGGTAGCCCAACTTCCACGGAAGAGGGCACGTCTGAG | |
| | AGTGCGACTCCTGAGAGCGGGCCTGGCACAAGTACTGAGCCCAGCGAAGG | |
| | TTCTGCACCCGGGTCTCCAGCTGGGAGCCCTACCTCAACAGAGGAAGGTAC | |
| | CAGCACAGAGCCTTCTGAGGGTAGCGCTCCTGGCACGTCCACCGAACCGTC | |
| | CGAGGGGATGGCACCGAAGAAAAAACGCAAAGTTGGTCGAGCCGCCATG | |
| | GCCGAACGACCATTCCAGTGCAGGATATGTATGCGCAATTTTTCAACCAGT | |
| | GGTTCATTGTCACGACATATTAGAACACACACCGGTGAGAAACCCTTTGCG | |
| | TGTGACATCTGTGGGAGGAAATTCGCAAGATCTGACAACCTTACGACACAT | |
| | ACAAAGATTCACACAGGCTCTCAAAAGCCCTTCCAGTGCCGAATTTGCATG | |
| | CGAAACTTTTCCCAGTCTGGTAATCTCGCTCGACATATCAGAACCCACACG | |
| | GGGGAAAAACCATTCGCTTGTGATATTTGCGGACGAAAGTTCGCCGACAG | |
| | AACCACACTCATGAGACACACTAAAATCCATACTGGTAGTCAGAAGCCGT | |
| | TTCAGTGTAGAATCTGCATGAGGAACTTTTCCCAGTCAGGCCACCTTGCAA | |
| | GACATATACGAACTCACACTGGAGAAAAGCCGTTCGCCTGTGACATTTGTG | |
| | GGCGCAAGTTCGCGCAACTCACCCATCTGAATAGCCATACGAAGATTCACT | |
| | TGAGACAGAAAGATGCGGCTCGGGCTCCGGACCGAAAAAAAAGAGAAAG | |
| | GTAAACGGCGGGGGAGGATCACGGACCCTGGTTACATTTAAGGACGTTTTT | |
| | GTAGACTTCACGAGGGAGGAATGGAAGCTGTTGGACACCGCCCAGCAAAT | |
| | CGTGTATCGAAATGTAATGTTGGAAAATTATAAAAATCTGGTTTCCCTCGG | |
| | CTACCAATTGACAAAACCAGACGTCATCCTCAGACTGGAAAAAGGGGAAG | |
| | AACCTTGGCTTGTCTGA | |
| 986 | ATGCACGATCAGGAGTTTGACCCCCCTAAGGTGTACCCACCCGTGCCAGCC | 3xFLAG- |
| | GAGAAGAGGAAGCCCATCCGCGTGCTGTCCCTGTTCGACGGCATCGCCAC | DNMT3AL- |
| | AGGCCTGCTGGTGCTGAAGGATCTGGGCATCCAGGTGGACAGATATATCG | XTEN80-SV40 |
| | CCTCCGAGGTGTGCGAGGATTCTATCACCGTGGGCATGGTGAGGCACCAG | NLS-ZFP-SV40 |
| | GGCAAGATCATGTACGTGGGCGACGTGCGCAGCGTGACACAGAAGCACAT | NLS-KRAB |
| | CCAGGAGTGGGGACCCTTCGACCTGGTCATCGGAGGCAGCCCCTGTAATG | (DNA sequence) |
| | ACCTGTCCATCGTGAACCCTGCAAGGAAGGGCCTGTATGAGGGAACCGGC | |
| | AGACTGTTCTTTGAGTTCTACAGGCTGCTGCACGACGCCCGCCCTAAGGAG | |
| | GGCGATGACAGGCCATTCTTTTGGCTGTTTGAGAACGTGGTGGCCATGGGC | |
| | GTGAGCGACAAGCGGGATATCTCCAGATTCCTGGAGTCTAATCCCGTGATG | |
| | ATCGATGCAAAGGAGGTGTCTGCCGCACACAGGGCAAGGTACTTTTGGGG | |
| | AAATCTGCCTGGCATGAACCGCCCACTGGCCAGCACCGTGAACGACAAGC | |
| | TGGAGCTGCAGGAGTGCCTGGAGCACGGAAGGATCGCCAAGTTCTCCAAG | |
| | GTGCGGACAATCACCACAAGATCTAACAGCATCAAGCAGGGCAAGGATCA | |
| | GCACTTCCCCGTGTTCATGAATGAGAAGGAGGACATCCTGTGGTGTACCGA | |
| | GATGGAGCGCGTGTTCGGCTTTCCAGTGCACTATACAGACGTGAGCAATAT | |
| | GAGCCGGCTGGCAAGGCAGAGACTGCTGGGCCGGTCCTGGTCTGTGCCAG | |
| | TGATCAGACACCTGTTCGCCCCCCTGAAGGAGTACTTTGCCTGCGTGTCTA | |
| | GCGGCAACTCTAATGCCAACAGCAGAGGCCCTTCCTTTTCCTCTGGCCTGG | |
| | TGCCACTGTCTCTGAGGGGCAGCCACATGGGCCCCATGGAGATCTACAAG | |
| | ACCGTGTCCGCCTGGAAGAGGCAGCCTGTGCGCGTGCTGTCTCTGTTCCGC | |
| | AACATCGACAAGGTGCTGAAGAGCCTGGGCTTTCTGGAGAGCGGATCCGG | |
| | ATCTGGAGGAGGCACCCTGAAGTATGTGGAGGATGTGACAAATGTGGTGC | |
| | GGAGAGATGTGGAGAAGTGGGGCCCCTTCGATCTGGTGTACGGATCCACC | |
| | CAGCCACTGGGAAGCTCCTGCGATAGGTGTCCAGGATGGTATATGTTCCAG | |
| | TTTCACAGAATCCTGCAGTACGCACTGCCAAGGCAGGAGAGCCAGCGCCC | |
| | TTTCTTTTGGATCTTTATGGACAACCTGCTGCTGACAGAGGATGACCAGGA | |
| | GACAACAACCCGCTTCCTGCAGACAGAGGCAGTGACCCTGCAGGATGTGA | |
| | GGGGACGCGACTATCAGAATGCCATGCGGGTGTGGTCTAACATCCCTGGC | |
| | CTGAAGAGCAAGCACGCCCCCCTGACCCCTAAGGAGGAGGAGTACCTGCA | |
| | GGCCCAGGTGCGGAGCAGATCCAAGCTGGATGCCCCTAAGGTGGACCTGC | |
| | TGGTGAAGAATTGTCTGCTGCCACTGCGGGAGTACTTCAAGTACTTTAGTC | |
| | AGAATAGCCTGCCACTGGGTGGACCTAGCTCTGGAGCCCCGCCTCCGTCAG | |
| | GTGGATCTCCTGCAGGTAGCCCAACTTCCACGGAAGAGGGCACGTCTGAG | |
| | AGTGCGACTCCTGAGAGCGGGCCTGGCACAAGTACTGAGCCCAGCGAAGG | |
| | TTCTGCACCCGGGTCTCCAGCTGGGAGCCCTACCTCAACAGAGGAAGGTAC | |
| | CAGCACAGAGCCTTCTGAGGGTAGCGCTCCTGGCACGTCCACCGAACCGTC | |
| | CGAGGGGATGGCACCGAAGAAAAAACGCAAAGTTGGTCGAGCAGCTATG | |
| | GCTGAACGCCCATTCCAGTGTCGGATCTGCATGCGCAACTTTTCTATAAAA | |
| | CACGATCTTCACCGACACATTCGGACACATACTGGGGAGAAGCCCTTTGCG | |
| | TGTGACATCTGTGGCCGAAAGTTCGCTAGATCCGCAAACTTGACTCGGCAT | |
| | ACGAAAATTCACACTGGAAGCCAGAAACCTTTCCAATGTCGAATCTGTATG | |
| | AGGAACTTTAGCAGAAGTGATAATCTCGCCAGGCATATCCGAACGCACAC | |
| | AGGCGAGAAGCCATTCGCATGTGATATTTGTGGTAGAAAGTTCGCCCAAA | |
| | ATGTCTCTCGCCCACGCCATACTAAGATCCACACGGGCTCCCAGAAGCCGT | |
| | TCCAATGCCGCATTTGCATGCGAAACTTTTCCAGATCAGACGATCTGAGCA | |
| | AGCATATTAGGACGCATACAGGGGAGAAGCCTTTTGCTTGCGACATTTGCG | |
| | GCCGGAAATTTGCTGACTCAAGTCACAGAACACGGCATACCAAGATACAC | |
| | CTTCGACAAAAAGATGCCGCACGGGCTCCGGACCGAAAAAAAAGAGAAA | |
| | GGTAAACGGCGGGGGAGGATCACGGACCCTGGTTACATTTAAGGACGTTT | |
| | TTGTAGACTTCACGAGGGAGGAATGGAAGCTGTTGGACACCGCCCAGCAA | |
| | ATCGTGTATCGAAATGTAATGTTGGAAAATTATAAAAATCTGGTTTCCCTC | |
| | GGCTACCAATTGACAAAACCAGACGTCATCCTCAGACTGGAAAAAGGGGA | |
| | AGAACCTTGGCTTGTCTGA | |
| 987 | ATGCACGATCAGGAGTTTGACCCCCCTAAGGTGTACCCACCCGTGCCAGCC | 3xFLAG- |
| | GAGAAGAGGAAGCCCATCCGCGTGCTGTCCCTGTTCGACGGCATCGCCAC | DNMT3AL- |
| | AGGCCTGCTGGTGCTGAAGGATCTGGGCATCCAGGTGGACAGATATATCG | XTEN80-SV40 |
| | CCTCCGAGGTGTGCGAGGATTCTATCACCGTGGGCATGGTGAGGCACCAG | NLS-ZFP-SV40 |
| | GGCAAGATCATGTACGTGGGCGACGTGCGCAGCGTGACACAGAAGCACAT | NLS-KRAB |
| | CCAGGAGTGGGGACCCTTCGACCTGGTCATCGGAGGCAGCCCCTGTAATG | (DNA sequence) |
| | ACCTGTCCATCGTGAACCCTGCAAGGAAGGGCCTGTATGAGGGAACCGGC | |
| | AGACTGTTCTTTGAGTTCTACAGGCTGCTGCACGACGCCCGCCCTAAGGAG | |
| | GGCGATGACAGGCCATTCTTTTGGCTGTTTGAGAACGTGGTGGCCATGGGC | |
| | GTGAGCGACAAGCGGGATATCTCCAGATTCCTGGAGTCTAATCCCGTGATG | |
| | ATCGATGCAAAGGAGGTGTCTGCCGCACACAGGGCAAGGTACTTTTGGGG | |
| | AAATCTGCCTGGCATGAACCGCCCACTGGCCAGCACCGTGAACGACAAGC | |
| | TGGAGCTGCAGGAGTGCCTGGAGCACGGAAGGATCGCCAAGTTCTCCAAG | |
| | GTGCGGACAATCACCACAAGATCTAACAGCATCAAGCAGGGCAAGGATCA | |
| | GCACTTCCCCGTGTTCATGAATGAGAAGGAGGACATCCTGTGGTGTACCGA | |
| | GATGGAGCGCGTGTTCGGCTTTCCAGTGCACTATACAGACGTGAGCAATAT | |
| | GAGCCGGCTGGCAAGGCAGAGACTGCTGGGCCGGTCCTGGTCTGTGCCAG | |
| | TGATCAGACACCTGTTCGCCCCCCTGAAGGAGTACTTTGCCTGCGTGTCTA | |
| | GCGGCAACTCTAATGCCAACAGCAGAGGCCCTTCCTTTTCCTCTGGCCTGG | |
| | TGCCACTGTCTCTGAGGGGCAGCCACATGGGCCCCATGGAGATCTACAAG | |
| | ACCGTGTCCGCCTGGAAGAGGCAGCCTGTGCGCGTGCTGTCTCTGTTCCGC | |
| | AACATCGACAAGGTGCTGAAGAGCCTGGGCTTTCTGGAGAGCGGATCCGG | |
| | ATCTGGAGGAGGCACCCTGAAGTATGTGGAGGATGTGACAAATGTGGTGC | |
| | GGAGAGATGTGGAGAAGTGGGGCCCCTTCGATCTGGTGTACGGATCCACC | |
| | CAGCCACTGGGAAGCTCCTGCGATAGGTGTCCAGGATGGTATATGTTCCAG | |
| | TTTCACAGAATCCTGCAGTACGCACTGCCAAGGCAGGAGAGCCAGCGCCC | |
| | TTTCTTTTGGATCTTTATGGACAACCTGCTGCTGACAGAGGATGACCAGGA | |
| | GACAACAACCCGCTTCCTGCAGACAGAGGCAGTGACCCTGCAGGATGTGA | |
| | GGGGACGCGACTATCAGAATGCCATGCGGGTGTGGTCTAACATCCCTGGC | |
| | CTGAAGAGCAAGCACGCCCCCCTGACCCCTAAGGAGGAGGAGTACCTGCA | |
| | GGCCCAGGTGCGGAGCAGATCCAAGCTGGATGCCCCTAAGGTGGACCTGC | |
| | TGGTGAAGAATTGTCTGCTGCCACTGCGGGAGTACTTCAAGTACTTTAGTC | |
| | AGAATAGCCTGCCACTGGGTGGACCTAGCTCTGGAGCCCCGCCTCCGTCAG | |
| | GTGGATCTCCTGCAGGTAGCCCAACTTCCACGGAAGAGGGCACGTCTGAG | |
| | AGTGCGACTCCTGAGAGCGGGCCTGGCACAAGTACTGAGCCCAGCGAAGG | |
| | TTCTGCACCCGGGTCTCCAGCTGGGAGCCCTACCTCAACAGAGGAAGGTAC | |
| | CAGCACAGAGCCTTCTGAGGGTAGCGCTCCTGGCACGTCCACCGAACCGTC | |
| | CGAGGGGATGGCACCGAAGAAAAAACGCAAAGTTGGTCGAGCGGCCATG | |
| | GCGGAACGACCCTTTCAGTGCCGAATTTGCATGAGGAACTTTTCACGATCT | |
| | GATAACCTGGCGAGGCACATCCGAACACATACGGGCGAGAAGCCATTCGC | |
| | ATGTGATATCTGCGGGCGAAAGTTCGCCCAAAATGTCAGTAGACCGCGAC | |
| | ATACTAAAATACACACTGGCTCACAGAAGCCGTTCCAATGCCGCATCTGTA | |
| | TGCGCAATTTTTCCCGAAGCGACGATCTGTCTAAACATATTCGGACGCACA | |
| | CTGGGGAAAAGCCTTTCGCTTGTGACATCTGTGGGAGGAAGTTCGCTGACA | |
| | GCTCTCATAGGACACGCCATACTAAGATTCATACCGGAAGCCAGAAGCCTT | |
| | TCCAGTGTCGGATTTGCATGAGAAACTTTAGCACTTCTAGCAACAGAAAGA | |
| | CACATATACGAACCCATACGGGTGAGAAACCGTTCGCATGCGATATCTGTG | |
| | GGCGAAAATTTGCAGCCCAATGGACCAGAGCTTGCCATACCAAGATACAC | |
| | CTTCGGCAGAAGGACGCTGCACGGGCTCCGGACCGAAAAAAAAGAGAAA | |
| | GGTAAACGGCGGGGGAGGATCACGGACCCTGGTTACATTTAAGGACGTTT | |
| | TTGTAGACTTCACGAGGGAGGAATGGAAGCTGTTGGACACCGCCCAGCAA | |
| | ATCGTGTATCGAAATGTAATGTTGGAAAATTATAAAAATCTGGTTTCCCTC | |
| | GGCTACCAATTGACAAAACCAGACGTCATCCTCAGACTGGAAAAAGGGGA | |
| | AGAACCTTGGCTTGTCTGA | |
| 988 | ATGCACGATCAGGAGTTTGACCCCCCTAAGGTGTACCCACCCGTGCCAGCC | 3xFLAG- |
| | GAGAAGAGGAAGCCCATCCGCGTGCTGTCCCTGTTCGACGGCATCGCCAC | DNMT3AL- |
| | AGGCCTGCTGGTGCTGAAGGATCTGGGCATCCAGGTGGACAGATATATCG | XTEN80-SV40 |
| | CCTCCGAGGTGTGCGAGGATTCTATCACCGTGGGCATGGTGAGGCACCAG | NLS-ZFP-SV40 |
| | GGCAAGATCATGTACGTGGGCGACGTGCGCAGCGTGACACAGAAGCACAT | NLS-KRAB |
| | CCAGGAGTGGGGACCCTTCGACCTGGTCATCGGAGGCAGCCCCTGTAATG | (DNA sequence) |
| | ACCTGTCCATCGTGAACCCTGCAAGGAAGGGCCTGTATGAGGGAACCGGC | |
| | AGACTGTTCTTTGAGTTCTACAGGCTGCTGCACGACGCCCGCCCTAAGGAG | |
| | GGCGATGACAGGCCATTCTTTTGGCTGTTTGAGAACGTGGTGGCCATGGGC | |
| | GTGAGCGACAAGCGGGATATCTCCAGATTCCTGGAGTCTAATCCCGTGATG | |
| | ATCGATGCAAAGGAGGTGTCTGCCGCACACAGGGCAAGGTACTTTTGGGG | |
| | AAATCTGCCTGGCATGAACCGCCCACTGGCCAGCACCGTGAACGACAAGC | |
| | TGGAGCTGCAGGAGTGCCTGGAGCACGGAAGGATCGCCAAGTTCTCCAAG | |
| | GTGCGGACAATCACCACAAGATCTAACAGCATCAAGCAGGGCAAGGATCA | |
| | GCACTTCCCCGTGTTCATGAATGAGAAGGAGGACATCCTGTGGTGTACCGA | |
| | GATGGAGCGCGTGTTCGGCTTTCCAGTGCACTATACAGACGTGAGCAATAT | |
| | GAGCCGGCTGGCAAGGCAGAGACTGCTGGGCCGGTCCTGGTCTGTGCCAG | |
| | TGATCAGACACCTGTTCGCCCCCCTGAAGGAGTACTTTGCCTGCGTGTCTA | |
| | GCGGCAACTCTAATGCCAACAGCAGAGGCCCTTCCTTTTCCTCTGGCCTGG | |
| | TGCCACTGTCTCTGAGGGGCAGCCACATGGGCCCCATGGAGATCTACAAG | |
| | ACCGTGTCCGCCTGGAAGAGGCAGCCTGTGCGCGTGCTGTCTCTGTTCCGC | |
| | AACATCGACAAGGTGCTGAAGAGCCTGGGCTTTCTGGAGAGCGGATCCGG | |
| | ATCTGGAGGAGGCACCCTGAAGTATGTGGAGGATGTGACAAATGTGGTGC | |
| | GGAGAGATGTGGAGAAGTGGGGCCCCTTCGATCTGGTGTACGGATCCACC | |
| | CAGCCACTGGGAAGCTCCTGCGATAGGTGTCCAGGATGGTATATGTTCCAG | |
| | TTTCACAGAATCCTGCAGTACGCACTGCCAAGGCAGGAGAGCCAGCGCCC | |
| | TTTCTTTTGGATCTTTATGGACAACCTGCTGCTGACAGAGGATGACCAGGA | |
| | GACAACAACCCGCTTCCTGCAGACAGAGGCAGTGACCCTGCAGGATGTGA | |
| | GGGGACGCGACTATCAGAATGCCATGCGGGTGTGGTCTAACATCCCTGGC | |
| | CTGAAGAGCAAGCACGCCCCCCTGACCCCTAAGGAGGAGGAGTACCTGCA | |
| | GGCCCAGGTGCGGAGCAGATCCAAGCTGGATGCCCCTAAGGTGGACCTGC | |
| | TGGTGAAGAATTGTCTGCTGCCACTGCGGGAGTACTTCAAGTACTTTAGTC | |
| | AGAATAGCCTGCCACTGGGTGGACCTAGCTCTGGAGCCCCGCCTCCGTCAG | |
| | GTGGATCTCCTGCAGGTAGCCCAACTTCCACGGAAGAGGGCACGTCTGAG | |
| | AGTGCGACTCCTGAGAGCGGGCCTGGCACAAGTACTGAGCCCAGCGAAGG | |
| | TTCTGCACCCGGGTCTCCAGCTGGGAGCCCTACCTCAACAGAGGAAGGTAC | |
| | CAGCACAGAGCCTTCTGAGGGTAGCGCTCCTGGCACGTCCACCGAACCGTC | |
| | CGAGGGGATGGCACCGAAGAAAAAACGCAAAGTTGGTCGAGCTGCGATG | |
| | GCAGAACGACCTTTTCAATGCCGAATTTGTATGAGGAACTTTTCCCGGTCA | |
| | GACGACCTTTCCAAGCACATCAGAACTCATACCGGAGAAAAACCGTTCGC | |
| | CTGTGACATTTGTGGACGGAAGTTTGCTGACTCCTCTCACAGGACTCGCCA | |
| | CACTAAGATACACACCGGAAGTCAGAAGCCCTTCCAATGTAGGATATGCA | |
| | TGAGAAACTTCAGTACGTCATCAAACCGAAAAACGCATATCAGGACACAT | |
| | ACCGGCGAAAAGCCGTTTGCATGTGATATCTGCGGCAGGAAATTTGCAGCT | |
| | CAGTGGACACGGGCATGTCACACAAAAATCCATACCGGTAGTCAAAAACC | |
| | GTTTCAGTGTCGAATCTGCATGAGGAACTTTAGCCGGAAGCAGACGAGAA | |
| | CCACGCATATAAGAACTCACACAGGTGAGAAACCCTTTGCGTGCGATATCT | |
| | GCGGTCGCAAATTTGCTCACCGATCCTCCCTGAGGCGACATACTAAAATAC | |
| | ATCTGCGACAGAAAGACGCGGCTCGGGCTCCGGACCGAAAAAAAAGAGA | |
| | AAGGTAAACGGCGGGGGAGGATCACGGACCCTGGTTACATTTAAGGACGT | |
| | TTTTGTAGACTTCACGAGGGAGGAATGGAAGCTGTTGGACACCGCCCAGC | |
| | AAATCGTGTATCGAAATGTAATGTTGGAAAATTATAAAAATCTGGTTTCCC | |
| | TCGGCTACCAATTGACAAAACCAGACGTCATCCTCAGACTGGAAAAAGGG | |
| | GAAGAACCTTGGCTTGTCTGA | |
| 989 | ATGCACGATCAGGAGTTTGACCCCCCTAAGGTGTACCCACCCGTGCCAGCC | 3xFLAG- |
| | GAGAAGAGGAAGCCCATCCGCGTGCTGTCCCTGTTCGACGGCATCGCCAC | DNMT3AL- |
| | AGGCCTGCTGGTGCTGAAGGATCTGGGCATCCAGGTGGACAGATATATCG | XTEN80-SV40 |
| | CCTCCGAGGTGTGCGAGGATTCTATCACCGTGGGCATGGTGAGGCACCAG | NLS-ZFP-SV40 |
| | GGCAAGATCATGTACGTGGGCGACGTGCGCAGCGTGACACAGAAGCACAT | NLS-KRAB |
| | CCAGGAGTGGGGACCCTTCGACCTGGTCATCGGAGGCAGCCCCTGTAATG | (DNA sequence) |
| | ACCTGTCCATCGTGAACCCTGCAAGGAAGGGCCTGTATGAGGGAACCGGC | |
| | AGACTGTTCTTTGAGTTCTACAGGCTGCTGCACGACGCCCGCCCTAAGGAG | |
| | GGCGATGACAGGCCATTCTTTTGGCTGTTTGAGAACGTGGTGGCCATGGGC | |
| | GTGAGCGACAAGCGGGATATCTCCAGATTCCTGGAGTCTAATCCCGTGATG | |
| | ATCGATGCAAAGGAGGTGTCTGCCGCACACAGGGCAAGGTACTTTTGGGG | |
| | AAATCTGCCTGGCATGAACCGCCCACTGGCCAGCACCGTGAACGACAAGC | |
| | TGGAGCTGCAGGAGTGCCTGGAGCACGGAAGGATCGCCAAGTTCTCCAAG | |
| | GTGCGGACAATCACCACAAGATCTAACAGCATCAAGCAGGGCAAGGATCA | |
| | GCACTTCCCCGTGTTCATGAATGAGAAGGAGGACATCCTGTGGTGTACCGA | |
| | GATGGAGCGCGTGTTCGGCTTTCCAGTGCACTATACAGACGTGAGCAATAT | |
| | GAGCCGGCTGGCAAGGCAGAGACTGCTGGGCCGGTCCTGGTCTGTGCCAG | |
| | TGATCAGACACCTGTTCGCCCCCCTGAAGGAGTACTTTGCCTGCGTGTCTA | |
| | GCGGCAACTCTAATGCCAACAGCAGAGGCCCTTCCTTTTCCTCTGGCCTGG | |
| | TGCCACTGTCTCTGAGGGGCAGCCACATGGGCCCCATGGAGATCTACAAG | |
| | ACCGTGTCCGCCTGGAAGAGGCAGCCTGTGCGCGTGCTGTCTCTGTTCCGC | |
| | AACATCGACAAGGTGCTGAAGAGCCTGGGCTTTCTGGAGAGCGGATCCGG | |
| | ATCTGGAGGAGGCACCCTGAAGTATGTGGAGGATGTGACAAATGTGGTGC | |
| | GGAGAGATGTGGAGAAGTGGGGCCCCTTCGATCTGGTGTACGGATCCACC | |
| | CAGCCACTGGGAAGCTCCTGCGATAGGTGTCCAGGATGGTATATGTTCCAG | |
| | TTTCACAGAATCCTGCAGTACGCACTGCCAAGGCAGGAGAGCCAGCGCCC | |
| | TTTCTTTTGGATCTTTATGGACAACCTGCTGCTGACAGAGGATGACCAGGA | |
| | GACAACAACCCGCTTCCTGCAGACAGAGGCAGTGACCCTGCAGGATGTGA | |
| | GGGGACGCGACTATCAGAATGCCATGCGGGTGTGGTCTAACATCCCTGGC | |
| | CTGAAGAGCAAGCACGCCCCCCTGACCCCTAAGGAGGAGGAGTACCTGCA | |
| | GGCCCAGGTGCGGAGCAGATCCAAGCTGGATGCCCCTAAGGTGGACCTGC | |
| | TGGTGAAGAATTGTCTGCTGCCACTGCGGGAGTACTTCAAGTACTTTAGTC | |
| | AGAATAGCCTGCCACTGGGTGGACCTAGCTCTGGAGCCCCGCCTCCGTCAG | |
| | GTGGATCTCCTGCAGGTAGCCCAACTTCCACGGAAGAGGGCACGTCTGAG | |
| | AGTGCGACTCCTGAGAGCGGGCCTGGCACAAGTACTGAGCCCAGCGAAGG | |
| | TTCTGCACCCGGGTCTCCAGCTGGGAGCCCTACCTCAACAGAGGAAGGTAC | |
| | CAGCACAGAGCCTTCTGAGGGTAGCGCTCCTGGCACGTCCACCGAACCGTC | |
| | CGAGGGGATGGCACCGAAGAAAAAACGCAAAGTTGGTCGAGCCGCCATG | |
| | GCAGAACGGCCTTTTCAGTGTCGGATCTGCATGAGAAACTTTAGTCAGAGT | |
| | GCCCATCGCAAGAATCATATTCGAACTCATACCGGTGAAAAACCGTTCGCG | |
| | TGCGACATCTGTGGTCGAAAGTTTGCCACATCATCCAATAGAAAAACGCAT | |
| | ACTAAGATTCATACCGGTAGCCAGAAACCATTCCAATGTAGAATCTGCATG | |
| | CGAAATTTCAGCAGGAGTGACAATTTGTCCGCACATATACGGACACACAC | |
| | GGGCGAAAAACCCTTTGCTTGCGATATATGCGGTAGAAAGTTCGCTAGGA | |
| | ACAACGACCGAAAAACACACACGAAGATTCATACAGGTAGTCAGAAGCCA | |
| | TTTCAATGTCGGATCTGTATGCGAAATTTCTCTACTTCTGGCAGCCTGTCCC | |
| | GGCACATCAGAACACATACCGGTGAGAAGCCATTTGCATGTGACATATGT | |
| | GGGAGAAAATTTGCCCAGGCGGGTCACCTTGCGAAGCATACAAAGATCCA | |
| | CCTCCGCCAGAAGGACGCCGCACGGGCTCCGGACCGAAAAAAAAGAGAA | |
| | AGGTAAACGGCGGGGGAGGATCACGGACCCTGGTTACATTTAAGGACGTT | |
| | TTTGTAGACTTCACGAGGGAGGAATGGAAGCTGTTGGACACCGCCCAGCA | |
| | AATCGTGTATCGAAATGTAATGTTGGAAAATTATAAAAATCTGGTTTCCCT | |
| | CGGCTACCAATTGACAAAACCAGACGTCATCCTCAGACTGGAAAAAGGGG | |
| | AAGAACCTTGGCTTGTCTGA | |
| 990 | ATGCACGATCAGGAGTTTGACCCCCCTAAGGTGTACCCACCCGTGCCAGCC | 3xFLAG- |
| | GAGAAGAGGAAGCCCATCCGCGTGCTGTCCCTGTTCGACGGCATCGCCAC | DNMT3AL- |
| | AGGCCTGCTGGTGCTGAAGGATCTGGGCATCCAGGTGGACAGATATATCG | XTEN80-SV40 |
| | CCTCCGAGGTGTGCGAGGATTCTATCACCGTGGGCATGGTGAGGCACCAG | NLS-ZFP-SV40 |
| | GGCAAGATCATGTACGTGGGCGACGTGCGCAGCGTGACACAGAAGCACAT | NLS-KRAB |
| | CCAGGAGTGGGGACCCTTCGACCTGGTCATCGGAGGCAGCCCCTGTAATG | (DNA sequence) |
| | ACCTGTCCATCGTGAACCCTGCAAGGAAGGGCCTGTATGAGGGAACCGGC | |
| | AGACTGTTCTTTGAGTTCTACAGGCTGCTGCACGACGCCCGCCCTAAGGAG | |
| | GGCGATGACAGGCCATTCTTTTGGCTGTTTGAGAACGTGGTGGCCATGGGC | |
| | GTGAGCGACAAGCGGGATATCTCCAGATTCCTGGAGTCTAATCCCGTGATG | |
| | ATCGATGCAAAGGAGGTGTCTGCCGCACACAGGGCAAGGTACTTTTGGGG | |
| | AAATCTGCCTGGCATGAACCGCCCACTGGCCAGCACCGTGAACGACAAGC | |
| | TGGAGCTGCAGGAGTGCCTGGAGCACGGAAGGATCGCCAAGTTCTCCAAG | |
| | GTGCGGACAATCACCACAAGATCTAACAGCATCAAGCAGGGCAAGGATCA | |
| | GCACTTCCCCGTGTTCATGAATGAGAAGGAGGACATCCTGTGGTGTACCGA | |
| | GATGGAGCGCGTGTTCGGCTTTCCAGTGCACTATACAGACGTGAGCAATAT | |
| | GAGCCGGCTGGCAAGGCAGAGACTGCTGGGCCGGTCCTGGTCTGTGCCAG | |
| | TGATCAGACACCTGTTCGCCCCCCTGAAGGAGTACTTTGCCTGCGTGTCTA | |
| | GCGGCAACTCTAATGCCAACAGCAGAGGCCCTTCCTTTTCCTCTGGCCTGG | |
| | TGCCACTGTCTCTGAGGGGCAGCCACATGGGCCCCATGGAGATCTACAAG | |
| | ACCGTGTCCGCCTGGAAGAGGCAGCCTGTGCGCGTGCTGTCTCTGTTCCGC | |
| | AACATCGACAAGGTGCTGAAGAGCCTGGGCTTTCTGGAGAGCGGATCCGG | |
| | ATCTGGAGGAGGCACCCTGAAGTATGTGGAGGATGTGACAAATGTGGTGC | |
| | GGAGAGATGTGGAGAAGTGGGGCCCCTTCGATCTGGTGTACGGATCCACC | |
| | CAGCCACTGGGAAGCTCCTGCGATAGGTGTCCAGGATGGTATATGTTCCAG | |
| | TTTCACAGAATCCTGCAGTACGCACTGCCAAGGCAGGAGAGCCAGCGCCC | |
| | TTTCTTTTGGATCTTTATGGACAACCTGCTGCTGACAGAGGATGACCAGGA | |
| | GACAACAACCCGCTTCCTGCAGACAGAGGCAGTGACCCTGCAGGATGTGA | |
| | GGGGACGCGACTATCAGAATGCCATGCGGGTGTGGTCTAACATCCCTGGC | |
| | CTGAAGAGCAAGCACGCCCCCCTGACCCCTAAGGAGGAGGAGTACCTGCA | |
| | GGCCCAGGTGCGGAGCAGATCCAAGCTGGATGCCCCTAAGGTGGACCTGC | |
| | TGGTGAAGAATTGTCTGCTGCCACTGCGGGAGTACTTCAAGTACTTTAGTC | |
| | AGAATAGCCTGCCACTGGGTGGACCTAGCTCTGGAGCCCCGCCTCCGTCAG | |
| | GTGGATCTCCTGCAGGTAGCCCAACTTCCACGGAAGAGGGCACGTCTGAG | |
| | AGTGCGACTCCTGAGAGCGGGCCTGGCACAAGTACTGAGCCCAGCGAAGG | |
| | TTCTGCACCCGGGTCTCCAGCTGGGAGCCCTACCTCAACAGAGGAAGGTAC | |
| | CAGCACAGAGCCTTCTGAGGGTAGCGCTCCTGGCACGTCCACCGAACCGTC | |
| | CGAGGGGATGGCACCGAAGAAAAAACGCAAAGTTGGTCGAGCGGCTATG | |
| | GCAGAGCGGCCATTCCAATGTAGGATATGTATGAGGAACTTCTCCCGGAG | |
| | CGATCACCTGTCCCAACACATCCGCACGCATACGGGTGAGAAGCCGTTTGC | |
| | TTGTGATATCTGCGGAAGAAAATTTGCAGCATCCAGTACACGCACAAAGC | |
| | ATACGAAGATTCATACGGGATCCCAAAAGCCCTTTCAATGCAGGATTTGTA | |
| | TGAGGAACTTCAGTCGGTCCGACGATCTGACACGACATATTAGAACTCATA | |
| | CTGGAGAGAAGCCATTCGCATGTGACATCTGCGGTAGGAAGTTCGCGCAG | |
| | AAATCTAACCTGTCATCTCACACCAAGATACATACAGGCTCACAGAAGCC | |
| | GTTTCAATGCCGCATCTGCATGAGGAATTTCAGCCAGTCCGCAAACAGAAC | |
| | TACGCATATTCGGACGCATACCGGCGAGAAGCCGTTTGCCTGCGACATTTG | |
| | CGGGAGGAAATTCGCACAGAACGCGACCAGAACCAAACACACCAAAATCC | |
| | ATCTTAGGCAAAAGGATGCGGCCCGGGCTCCGGACCGAAAAAAAAGAGA | |
| | AAGGTAAACGGCGGGGGAGGATCACGGACCCTGGTTACATTTAAGGACGT | |
| | TTTTGTAGACTTCACGAGGGAGGAATGGAAGCTGTTGGACACCGCCCAGC | |
| | AAATCGTGTATCGAAATGTAATGTTGGAAAATTATAAAAATCTGGTTTCCC | |
| | TCGGCTACCAATTGACAAAACCAGACGTCATCCTCAGACTGGAAAAAGGG | |
| | GAAGAACCTTGGCTTGTCTGA | |
| 991 | ATGCACGATCAGGAGTTTGACCCCCCTAAGGTGTACCCACCCGTGCCAGCC | 3xFLAG- |
| | GAGAAGAGGAAGCCCATCCGCGTGCTGTCCCTGTTCGACGGCATCGCCAC | DNMT3AL- |
| | AGGCCTGCTGGTGCTGAAGGATCTGGGCATCCAGGTGGACAGATATATCG | XTEN80-SV40 |
| | CCTCCGAGGTGTGCGAGGATTCTATCACCGTGGGCATGGTGAGGCACCAG | NLS-ZFP-SV40 |
| | GGCAAGATCATGTACGTGGGCGACGTGCGCAGCGTGACACAGAAGCACAT | NLS-KRAB |
| | CCAGGAGTGGGGACCCTTCGACCTGGTCATCGGAGGCAGCCCCTGTAATG | (DNA sequence) |
| | ACCTGTCCATCGTGAACCCTGCAAGGAAGGGCCTGTATGAGGGAACCGGC | |
| | AGACTGTTCTTTGAGTTCTACAGGCTGCTGCACGACGCCCGCCCTAAGGAG | |
| | GGCGATGACAGGCCATTCTTTTGGCTGTTTGAGAACGTGGTGGCCATGGGC | |
| | GTGAGCGACAAGCGGGATATCTCCAGATTCCTGGAGTCTAATCCCGTGATG | |
| | ATCGATGCAAAGGAGGTGTCTGCCGCACACAGGGCAAGGTACTTTTGGGG | |
| | AAATCTGCCTGGCATGAACCGCCCACTGGCCAGCACCGTGAACGACAAGC | |
| | TGGAGCTGCAGGAGTGCCTGGAGCACGGAAGGATCGCCAAGTTCTCCAAG | |
| | GTGCGGACAATCACCACAAGATCTAACAGCATCAAGCAGGGCAAGGATCA | |
| | GCACTTCCCCGTGTTCATGAATGAGAAGGAGGACATCCTGTGGTGTACCGA | |
| | GATGGAGCGCGTGTTCGGCTTTCCAGTGCACTATACAGACGTGAGCAATAT | |
| | GAGCCGGCTGGCAAGGCAGAGACTGCTGGGCCGGTCCTGGTCTGTGCCAG | |
| | TGATCAGACACCTGTTCGCCCCCCTGAAGGAGTACTTTGCCTGCGTGTCTA | |
| | GCGGCAACTCTAATGCCAACAGCAGAGGCCCTTCCTTTTCCTCTGGCCTGG | |
| | TGCCACTGTCTCTGAGGGGCAGCCACATGGGCCCCATGGAGATCTACAAG | |
| | ACCGTGTCCGCCTGGAAGAGGCAGCCTGTGCGCGTGCTGTCTCTGTTCCGC | |
| | AACATCGACAAGGTGCTGAAGAGCCTGGGCTTTCTGGAGAGCGGATCCGG | |
| | ATCTGGAGGAGGCACCCTGAAGTATGTGGAGGATGTGACAAATGTGGTGC | |
| | GGAGAGATGTGGAGAAGTGGGGCCCCTTCGATCTGGTGTACGGATCCACC | |
| | CAGCCACTGGGAAGCTCCTGCGATAGGTGTCCAGGATGGTATATGTTCCAG | |
| | TTTCACAGAATCCTGCAGTACGCACTGCCAAGGCAGGAGAGCCAGCGCCC | |
| | TTTCTTTTGGATCTTTATGGACAACCTGCTGCTGACAGAGGATGACCAGGA | |
| | GACAACAACCCGCTTCCTGCAGACAGAGGCAGTGACCCTGCAGGATGTGA | |
| | GGGGACGCGACTATCAGAATGCCATGCGGGTGTGGTCTAACATCCCTGGC | |
| | CTGAAGAGCAAGCACGCCCCCCTGACCCCTAAGGAGGAGGAGTACCTGCA | |
| | GGCCCAGGTGCGGAGCAGATCCAAGCTGGATGCCCCTAAGGTGGACCTGC | |
| | TGGTGAAGAATTGTCTGCTGCCACTGCGGGAGTACTTCAAGTACTTTAGTC | |
| | AGAATAGCCTGCCACTGGGTGGACCTAGCTCTGGAGCCCCGCCTCCGTCAG | |
| | GTGGATCTCCTGCAGGTAGCCCAACTTCCACGGAAGAGGGCACGTCTGAG | |
| | AGTGCGACTCCTGAGAGCGGGCCTGGCACAAGTACTGAGCCCAGCGAAGG | |
| | TTCTGCACCCGGGTCTCCAGCTGGGAGCCCTACCTCAACAGAGGAAGGTAC | |
| | CAGCACAGAGCCTTCTGAGGGTAGCGCTCCTGGCACGTCCACCGAACCGTC | |
| | CGAGGGGATGGCACCGAAGAAAAAACGCAAAGTTGGTCGAGCGGCCATG | |
| | GCAGAACGACCCTTTCAGTGCCGAATTTGCATGCGGAACTTTAGTCGCAGT | |
| | GACACCCTGAGCGAGCATATTCGCACGCATACGGGAGAGAAGCCATTTGC | |
| | ATGCGACATCTGCGGTAGAAAGTTTGCGAGGCGCTGGACGTTGGTAGGCC | |
| | ACACGAAAATCCATACAGGCTCCCAGAAACCCTTCCAGTGCAGAATTTGTA | |
| | TGCGCAATTTTAGTGACAGAAGTAACTTGTCCCGACATATAAGGACGCACA | |
| | CCGGCGAAAAACCGTTTGCCTGTGATATCTGTGGTCGGAAATTCGCCCAGT | |
| | CCGGTGACTTGACACGGCATACCAAAATACACACTGGAAGCCAAAAGCCT | |
| | TTTCAGTGTCGCATATGTATGCGCAACTTCAGCCAGAGTAGTGACCTTTCA | |
| | CGGCATATACGGACGCATACGGGTGAGAAACCCTTCGCCTGTGACATTTGC | |
| | GGGCGAAAGTTTGCATATCATTGGTACCTGAAAAAACATACGAAAATACA | |
| | TTTGAGACAAAAAGATGCAGCCCGGGCTCCGGACCGAAAAAAAAGAGAA | |
| | AGGTAAACGGCGGGGGAGGATCACGGACCCTGGTTACATTTAAGGACGTT | |
| | TTTGTAGACTTCACGAGGGAGGAATGGAAGCTGTTGGACACCGCCCAGCA | |
| | AATCGTGTATCGAAATGTAATGTTGGAAAATTATAAAAATCTGGTTTCCCT | |
| | CGGCTACCAATTGACAAAACCAGACGTCATCCTCAGACTGGAAAAAGGGG | |
| | AAGAACCTTGGCTTGTCTGA | |
| 992 | ATGCACGATCAGGAGTTTGACCCCCCTAAGGTGTACCCACCCGTGCCAGCC | 3xFLAG- |
| | GAGAAGAGGAAGCCCATCCGCGTGCTGTCCCTGTTCGACGGCATCGCCAC | DNMT3AL- |
| | AGGCCTGCTGGTGCTGAAGGATCTGGGCATCCAGGTGGACAGATATATCG | XTEN80-SV40 |
| | CCTCCGAGGTGTGCGAGGATTCTATCACCGTGGGCATGGTGAGGCACCAG | NLS-ZFP-SV40 |
| | GGCAAGATCATGTACGTGGGCGACGTGCGCAGCGTGACACAGAAGCACAT | NLS-KRAB |
| | CCAGGAGTGGGGACCCTTCGACCTGGTCATCGGAGGCAGCCCCTGTAATG | (DNA sequence) |
| | ACCTGTCCATCGTGAACCCTGCAAGGAAGGGCCTGTATGAGGGAACCGGC | |
| | AGACTGTTCTTTGAGTTCTACAGGCTGCTGCACGACGCCCGCCCTAAGGAG | |
| | GGCGATGACAGGCCATTCTTTTGGCTGTTTGAGAACGTGGTGGCCATGGGC | |
| | GTGAGCGACAAGCGGGATATCTCCAGATTCCTGGAGTCTAATCCCGTGATG | |
| | ATCGATGCAAAGGAGGTGTCTGCCGCACACAGGGCAAGGTACTTTTGGGG | |
| | AAATCTGCCTGGCATGAACCGCCCACTGGCCAGCACCGTGAACGACAAGC | |
| | TGGAGCTGCAGGAGTGCCTGGAGCACGGAAGGATCGCCAAGTTCTCCAAG | |
| | GTGCGGACAATCACCACAAGATCTAACAGCATCAAGCAGGGCAAGGATCA | |
| | GCACTTCCCCGTGTTCATGAATGAGAAGGAGGACATCCTGTGGTGTACCGA | |
| | GATGGAGCGCGTGTTCGGCTTTCCAGTGCACTATACAGACGTGAGCAATAT | |
| | GAGCCGGCTGGCAAGGCAGAGACTGCTGGGCCGGTCCTGGTCTGTGCCAG | |
| | TGATCAGACACCTGTTCGCCCCCCTGAAGGAGTACTTTGCCTGCGTGTCTA | |
| | GCGGCAACTCTAATGCCAACAGCAGAGGCCCTTCCTTTTCCTCTGGCCTGG | |
| | TGCCACTGTCTCTGAGGGGCAGCCACATGGGCCCCATGGAGATCTACAAG | |
| | ACCGTGTCCGCCTGGAAGAGGCAGCCTGTGCGCGTGCTGTCTCTGTTCCGC | |
| | AACATCGACAAGGTGCTGAAGAGCCTGGGCTTTCTGGAGAGCGGATCCGG | |
| | ATCTGGAGGAGGCACCCTGAAGTATGTGGAGGATGTGACAAATGTGGTGC | |
| | GGAGAGATGTGGAGAAGTGGGGCCCCTTCGATCTGGTGTACGGATCCACC | |
| | CAGCCACTGGGAAGCTCCTGCGATAGGTGTCCAGGATGGTATATGTTCCAG | |
| | TTTCACAGAATCCTGCAGTACGCACTGCCAAGGCAGGAGAGCCAGCGCCC | |
| | TTTCTTTTGGATCTTTATGGACAACCTGCTGCTGACAGAGGATGACCAGGA | |
| | GACAACAACCCGCTTCCTGCAGACAGAGGCAGTGACCCTGCAGGATGTGA | |
| | GGGGACGCGACTATCAGAATGCCATGCGGGTGTGGTCTAACATCCCTGGC | |
| | CTGAAGAGCAAGCACGCCCCCCTGACCCCTAAGGAGGAGGAGTACCTGCA | |
| | GGCCCAGGTGCGGAGCAGATCCAAGCTGGATGCCCCTAAGGTGGACCTGC | |
| | TGGTGAAGAATTGTCTGCTGCCACTGCGGGAGTACTTCAAGTACTTTAGTC | |
| | AGAATAGCCTGCCACTGGGTGGACCTAGCTCTGGAGCCCCGCCTCCGTCAG | |
| | GTGGATCTCCTGCAGGTAGCCCAACTTCCACGGAAGAGGGCACGTCTGAG | |
| | AGTGCGACTCCTGAGAGCGGGCCTGGCACAAGTACTGAGCCCAGCGAAGG | |
| | TTCTGCACCCGGGTCTCCAGCTGGGAGCCCTACCTCAACAGAGGAAGGTAC | |
| | CAGCACAGAGCCTTCTGAGGGTAGCGCTCCTGGCACGTCCACCGAACCGTC | |
| | CGAGGGGATGGCACCGAAGAAAAAACGCAAAGTTGGTCGAGCTGCCATGG | |
| | CCGAGCGCCCGTTTCAATGCAGAATATGTATGAGGAACTTCTCTAGAAGCG | |
| | CCAATCTTGCGCGACACATTAGAACTCACACAGGCGAGAAACCTTTCGCCT | |
| | GTGACATCTGCGGCAGAAAATTTGCGCGAAGTGATAACTTGCGCGAGCAC | |
| | ACAAAAATCCATACCGGTTCCCAAAAGCCCTTTCAATGTAGGATTTGCATG | |
| | AGGAACTTTTCAAGACCATACACGCTGAGACTCCACATTCGCACGCATACG | |
| | GGAGAAAAACCATTTGCTTGTGACATATGCGGCCGAAAGTTTGCACACCG | |
| | ATCCAACTTGAATAAGCATACCAAAATCCATACGGGGTCTCAGAAACCCTT | |
| | CCAGTGTCGGATTTGTATGCGAAACTTCTCTCAGAGTGGTTCTCTTACGCG | |
| | CCACATTAGAACCCACACGGGGGAAAAGCCATTCGCGTGCGATATCTGTG | |
| | GCCGGAAATTTGCTACTTCCGCAAATCTTTCTCGACATACAAAGATACATC | |
| | TTAGACAGAAGGATGCGGCACGGGCTCCGGACCGAAAAAAAAGAGAAAG | |
| | GTAAACGGCGGGGGAGGATCACGGACCCTGGTTACATTTAAGGACGTTTTT | |
| | GTAGACTTCACGAGGGAGGAATGGAAGCTGTTGGACACCGCCCAGCAAAT | |
| | CGTGTATCGAAATGTAATGTTGGAAAATTATAAAAATCTGGTTTCCCTCGG | |
| | CTACCAATTGACAAAACCAGACGTCATCCTCAGACTGGAAAAAGGGGAAG | |
| | AACCTTGGCTTGTCTGA | |
| 993 | ATGCACGATCAGGAGTTTGACCCCCCTAAGGTGTACCCACCCGTGCCAGCC | 3xFLAG- |
| | GAGAAGAGGAAGCCCATCCGCGTGCTGTCCCTGTTCGACGGCATCGCCAC | DNMT3AL- |
| | AGGCCTGCTGGTGCTGAAGGATCTGGGCATCCAGGTGGACAGATATATCG | XTEN80-SV40 |
| | CCTCCGAGGTGTGCGAGGATTCTATCACCGTGGGCATGGTGAGGCACCAG | NLS-ZFP-SV40 |
| | GGCAAGATCATGTACGTGGGCGACGTGCGCAGCGTGACACAGAAGCACAT | NLS-KRAB |
| | CCAGGAGTGGGGACCCTTCGACCTGGTCATCGGAGGCAGCCCCTGTAATG | (DNA sequence) |
| | ACCTGTCCATCGTGAACCCTGCAAGGAAGGGCCTGTATGAGGGAACCGGC | |
| | AGACTGTTCTTTGAGTTCTACAGGCTGCTGCACGACGCCCGCCCTAAGGAG | |
| | GGCGATGACAGGCCATTCTTTTGGCTGTTTGAGAACGTGGTGGCCATGGGC | |
| | GTGAGCGACAAGCGGGATATCTCCAGATTCCTGGAGTCTAATCCCGTGATG | |
| | ATCGATGCAAAGGAGGTGTCTGCCGCACACAGGGCAAGGTACTTTTGGGG | |
| | AAATCTGCCTGGCATGAACCGCCCACTGGCCAGCACCGTGAACGACAAGC | |
| | TGGAGCTGCAGGAGTGCCTGGAGCACGGAAGGATCGCCAAGTTCTCCAAG | |
| | GTGCGGACAATCACCACAAGATCTAACAGCATCAAGCAGGGCAAGGATCA | |
| | GCACTTCCCCGTGTTCATGAATGAGAAGGAGGACATCCTGTGGTGTACCGA | |
| | GATGGAGCGCGTGTTCGGCTTTCCAGTGCACTATACAGACGTGAGCAATAT | |
| | GAGCCGGCTGGCAAGGCAGAGACTGCTGGGCCGGTCCTGGTCTGTGCCAG | |
| | TGATCAGACACCTGTTCGCCCCCCTGAAGGAGTACTTTGCCTGCGTGTCTA | |
| | GCGGCAACTCTAATGCCAACAGCAGAGGCCCTTCCTTTTCCTCTGGCCTGG | |
| | TGCCACTGTCTCTGAGGGGCAGCCACATGGGCCCCATGGAGATCTACAAG | |
| | ACCGTGTCCGCCTGGAAGAGGCAGCCTGTGCGCGTGCTGTCTCTGTTCCGC | |
| | AACATCGACAAGGTGCTGAAGAGCCTGGGCTTTCTGGAGAGCGGATCCGG | |
| | ATCTGGAGGAGGCACCCTGAAGTATGTGGAGGATGTGACAAATGTGGTGC | |
| | GGAGAGATGTGGAGAAGTGGGGCCCCTTCGATCTGGTGTACGGATCCACC | |
| | CAGCCACTGGGAAGCTCCTGCGATAGGTGTCCAGGATGGTATATGTTCCAG | |
| | TTTCACAGAATCCTGCAGTACGCACTGCCAAGGCAGGAGAGCCAGCGCCC | |
| | TTTCTTTTGGATCTTTATGGACAACCTGCTGCTGACAGAGGATGACCAGGA | |
| | GACAACAACCCGCTTCCTGCAGACAGAGGCAGTGACCCTGCAGGATGTGA | |
| | GGGGACGCGACTATCAGAATGCCATGCGGGTGTGGTCTAACATCCCTGGC | |
| | CTGAAGAGCAAGCACGCCCCCCTGACCCCTAAGGAGGAGGAGTACCTGCA | |
| | GGCCCAGGTGCGGAGCAGATCCAAGCTGGATGCCCCTAAGGTGGACCTGC | |
| | TGGTGAAGAATTGTCTGCTGCCACTGCGGGAGTACTTCAAGTACTTTAGTC | |
| | AGAATAGCCTGCCACTGGGTGGACCTAGCTCTGGAGCCCCGCCTCCGTCAG | |
| | GTGGATCTCCTGCAGGTAGCCCAACTTCCACGGAAGAGGGCACGTCTGAG | |
| | AGTGCGACTCCTGAGAGCGGGCCTGGCACAAGTACTGAGCCCAGCGAAGG | |
| | TTCTGCACCCGGGTCTCCAGCTGGGAGCCCTACCTCAACAGAGGAAGGTAC | |
| | CAGCACAGAGCCTTCTGAGGGTAGCGCTCCTGGCACGTCCACCGAACCGTC | |
| | CGAGGGGATGGCACCGAAGAAAAAACGCAAAGTTGGTCGATTGGAGCCCG | |
| | GTGAAAAACCATATGCCTGTCCAGAGTGTGGAAAAAGTTTTAGCAGAAGC | |
| | GACGACCTGGTTAGGCATCAACGAACTCACACAGGGGAAAAGCCGTACAA | |
| | ATGTCCTGAATGCGGAAAGTCATTCTCCACTTCAGGTAGCCTCGTGCGACA | |
| | TCAGCGCACACATACTGGCGAAAAACCTTATAAGTGTCCGGAATGCGGCA | |
| | AGAGTTTTTCTAGAAGTGATAAGCTCGTGCGACACCAGCGGACGCACACG | |
| | GGTGAGAAGCCCTACGCCTGCCCAGAGTGCGGAAAGTCCTTTAGTAGGTCT | |
| | GACGAACTGGTCCGGCACCAACGAACCCATACAGGGGAGAAACCCTACAA | |
| | ATGTCCAGAGTGCGGGAAATCATTTTCAACGTCTCACAGCTTGACGGAACA | |
| | TCAGAGGACCCATACAGGCGAAAAGCCTTACAAATGTCCGGAGTGCGGAA | |
| | AGTCTTTCAGCCGGGCTGATAATCTCACGGAGCACCAAAGAACCCACACG | |
| | GGTAAGAAAACCTCTGCTCCGGACCGAAAAAAAAGAGAAAGGTAAACGG | |
| | CGGGGGAGGATCACGGACCCTGGTTACATTTAAGGACGTTTTTGTAGACTT | |
| | CACGAGGGAGGAATGGAAGCTGTTGGACACCGCCCAGCAAATCGTGTATC | |
| | GAAATGTAATGTTGGAAAATTATAAAAATCTGGTTTCCCTCGGCTACCAAT | |
| | TGACAAAACCAGACGTCATCCTCAGACTGGAAAAAGGGGAAGAACCTTGG | |
| | CTTGTCTGA | |
| 994 | ATGCACGATCAGGAGTTTGACCCCCCTAAGGTGTACCCACCCGTGCCAGCC | 3xFLAG- |
| | GAGAAGAGGAAGCCCATCCGCGTGCTGTCCCTGTTCGACGGCATCGCCAC | DNMT3AL- |
| | AGGCCTGCTGGTGCTGAAGGATCTGGGCATCCAGGTGGACAGATATATCG | XTEN80-SV40 |
| | CCTCCGAGGTGTGCGAGGATTCTATCACCGTGGGCATGGTGAGGCACCAG | NLS-ZFP-SV40 |
| | GGCAAGATCATGTACGTGGGCGACGTGCGCAGCGTGACACAGAAGCACAT | NLS-KRAB |
| | CCAGGAGTGGGGACCCTTCGACCTGGTCATCGGAGGCAGCCCCTGTAATG | (DNA sequence) |
| | ACCTGTCCATCGTGAACCCTGCAAGGAAGGGCCTGTATGAGGGAACCGGC | |
| | AGACTGTTCTTTGAGTTCTACAGGCTGCTGCACGACGCCCGCCCTAAGGAG | |
| | GGCGATGACAGGCCATTCTTTTGGCTGTTTGAGAACGTGGTGGCCATGGGC | |
| | GTGAGCGACAAGCGGGATATCTCCAGATTCCTGGAGTCTAATCCCGTGATG | |
| | ATCGATGCAAAGGAGGTGTCTGCCGCACACAGGGCAAGGTACTTTTGGGG | |
| | AAATCTGCCTGGCATGAACCGCCCACTGGCCAGCACCGTGAACGACAAGC | |
| | TGGAGCTGCAGGAGTGCCTGGAGCACGGAAGGATCGCCAAGTTCTCCAAG | |
| | GTGCGGACAATCACCACAAGATCTAACAGCATCAAGCAGGGCAAGGATCA | |
| | GCACTTCCCCGTGTTCATGAATGAGAAGGAGGACATCCTGTGGTGTACCGA | |
| | GATGGAGCGCGTGTTCGGCTTTCCAGTGCACTATACAGACGTGAGCAATAT | |
| | GAGCCGGCTGGCAAGGCAGAGACTGCTGGGCCGGTCCTGGTCTGTGCCAG | |
| | TGATCAGACACCTGTTCGCCCCCCTGAAGGAGTACTTTGCCTGCGTGTCTA | |
| | GCGGCAACTCTAATGCCAACAGCAGAGGCCCTTCCTTTTCCTCTGGCCTGG | |
| | TGCCACTGTCTCTGAGGGGCAGCCACATGGGCCCCATGGAGATCTACAAG | |
| | ACCGTGTCCGCCTGGAAGAGGCAGCCTGTGCGCGTGCTGTCTCTGTTCCGC | |
| | AACATCGACAAGGTGCTGAAGAGCCTGGGCTTTCTGGAGAGCGGATCCGG | |
| | ATCTGGAGGAGGCACCCTGAAGTATGTGGAGGATGTGACAAATGTGGTGC | |
| | GGAGAGATGTGGAGAAGTGGGGCCCCTTCGATCTGGTGTACGGATCCACC | |
| | CAGCCACTGGGAAGCTCCTGCGATAGGTGTCCAGGATGGTATATGTTCCAG | |
| | TTTCACAGAATCCTGCAGTACGCACTGCCAAGGCAGGAGAGCCAGCGCCC | |
| | TTTCTTTTGGATCTTTATGGACAACCTGCTGCTGACAGAGGATGACCAGGA | |
| | GACAACAACCCGCTTCCTGCAGACAGAGGCAGTGACCCTGCAGGATGTGA | |
| | GGGGACGCGACTATCAGAATGCCATGCGGGTGTGGTCTAACATCCCTGGC | |
| | CTGAAGAGCAAGCACGCCCCCCTGACCCCTAAGGAGGAGGAGTACCTGCA | |
| | GGCCCAGGTGCGGAGCAGATCCAAGCTGGATGCCCCTAAGGTGGACCTGC | |
| | TGGTGAAGAATTGTCTGCTGCCACTGCGGGAGTACTTCAAGTACTTTAGTC | |
| | AGAATAGCCTGCCACTGGGTGGACCTAGCTCTGGAGCCCCGCCTCCGTCAG | |
| | GTGGATCTCCTGCAGGTAGCCCAACTTCCACGGAAGAGGGCACGTCTGAG | |
| | AGTGCGACTCCTGAGAGCGGGCCTGGCACAAGTACTGAGCCCAGCGAAGG | |
| | TTCTGCACCCGGGTCTCCAGCTGGGAGCCCTACCTCAACAGAGGAAGGTAC | |
| | CAGCACAGAGCCTTCTGAGGGTAGCGCTCCTGGCACGTCCACCGAACCGTC | |
| | CGAGGGGATGGCACCGAAGAAAAAACGCAAAGTTGGTCGATTGGAGCCG | |
| | GGAGAAAAGCCATATGCCTGTCCGGAATGCGGCAAAAGCTTTTCAGAACG | |
| | GTCCCATTTGCGGGAACATCAGCGCACCCATACCGGAGAAAAGCCTTACA | |
| | AGTGTCCCGAGTGTGGTAAGAGCTTTTCAACTTCCCACAGTCTCACTGAAC | |
| | ATCAGCGAACTCACACAGGCGAAAAACCATACAAATGCCCGGAGTGTGGA | |
| | AAGAGTTTTTCTCAAGCTGGGCACTTGGCCAGCCACCAAAGGACTCATACG | |
| | GGCGAGAAACCGTATGCCTGTCCAGAATGCGGGAAATCATTTTCTACTAGT | |
| | CATTCCCTTACGGAACATCAGAGAACGCACACCGGGGAGAAGCCATACAA | |
| | GTGTCCGGAGTGCGGAAAATCATTCTCCGACCCGGGTCATCTCGTTCGCCA | |
| | TCAGAGGACTCATACTGGAGAGAAACCGTATAAATGTCCTGAATGCGGGA | |
| | AGAGCTTTTCTACATCTGGGAACCTTGTGCGGCACCAGCGAACCCACACGG | |
| | GGAAAAAGACTTCTGCTCCGGACCGAAAAAAAAGAGAAAGGTAAACGGC | |
| | GGGGGAGGATCACGGACCCTGGTTACATTTAAGGACGTTTTTGTAGACTTC | |
| | ACGAGGGAGGAATGGAAGCTGTTGGACACCGCCCAGCAAATCGTGTATCG | |
| | AAATGTAATGTTGGAAAATTATAAAAATCTGGTTTCCCTCGGCTACCAATT | |
| | GACAAAACCAGACGTCATCCTCAGACTGGAAAAAGGGGAAGAACCTTGGC | |
| | TTGTCTGA | |
| 995 | ATGCACGATCAGGAGTTTGACCCCCCTAAGGTGTACCCACCCGTGCCAGCC | 3xFLAG- |
| | GAGAAGAGGAAGCCCATCCGCGTGCTGTCCCTGTTCGACGGCATCGCCAC | DNMT3AL- |
| | AGGCCTGCTGGTGCTGAAGGATCTGGGCATCCAGGTGGACAGATATATCG | XTEN80-SV40 |
| | CCTCCGAGGTGTGCGAGGATTCTATCACCGTGGGCATGGTGAGGCACCAG | NLS-ZFP-SV40 |
| | GGCAAGATCATGTACGTGGGCGACGTGCGCAGCGTGACACAGAAGCACAT | NLS-KRAB |
| | CCAGGAGTGGGGACCCTTCGACCTGGTCATCGGAGGCAGCCCCTGTAATG | (DNA sequence) |
| | ACCTGTCCATCGTGAACCCTGCAAGGAAGGGCCTGTATGAGGGAACCGGC | |
| | AGACTGTTCTTTGAGTTCTACAGGCTGCTGCACGACGCCCGCCCTAAGGAG | |
| | GGCGATGACAGGCCATTCTTTTGGCTGTTTGAGAACGTGGTGGCCATGGGC | |
| | GTGAGCGACAAGCGGGATATCTCCAGATTCCTGGAGTCTAATCCCGTGATG | |
| | ATCGATGCAAAGGAGGTGTCTGCCGCACACAGGGCAAGGTACTTTTGGGG | |
| | AAATCTGCCTGGCATGAACCGCCCACTGGCCAGCACCGTGAACGACAAGC | |
| | TGGAGCTGCAGGAGTGCCTGGAGCACGGAAGGATCGCCAAGTTCTCCAAG | |
| | GTGCGGACAATCACCACAAGATCTAACAGCATCAAGCAGGGCAAGGATCA | |
| | GCACTTCCCCGTGTTCATGAATGAGAAGGAGGACATCCTGTGGTGTACCGA | |
| | GATGGAGCGCGTGTTCGGCTTTCCAGTGCACTATACAGACGTGAGCAATAT | |
| | GAGCCGGCTGGCAAGGCAGAGACTGCTGGGCCGGTCCTGGTCTGTGCCAG | |
| | TGATCAGACACCTGTTCGCCCCCCTGAAGGAGTACTTTGCCTGCGTGTCTA | |
| | GCGGCAACTCTAATGCCAACAGCAGAGGCCCTTCCTTTTCCTCTGGCCTGG | |
| | TGCCACTGTCTCTGAGGGGCAGCCACATGGGCCCCATGGAGATCTACAAG | |
| | ACCGTGTCCGCCTGGAAGAGGCAGCCTGTGCGCGTGCTGTCTCTGTTCCGC | |
| | AACATCGACAAGGTGCTGAAGAGCCTGGGCTTTCTGGAGAGCGGATCCGG | |
| | ATCTGGAGGAGGCACCCTGAAGTATGTGGAGGATGTGACAAATGTGGTGC | |
| | GGAGAGATGTGGAGAAGTGGGGCCCCTTCGATCTGGTGTACGGATCCACC | |
| | CAGCCACTGGGAAGCTCCTGCGATAGGTGTCCAGGATGGTATATGTTCCAG | |
| | TTTCACAGAATCCTGCAGTACGCACTGCCAAGGCAGGAGAGCCAGCGCCC | |
| | TTTCTTTTGGATCTTTATGGACAACCTGCTGCTGACAGAGGATGACCAGGA | |
| | GACAACAACCCGCTTCCTGCAGACAGAGGCAGTGACCCTGCAGGATGTGA | |
| | GGGGACGCGACTATCAGAATGCCATGCGGGTGTGGTCTAACATCCCTGGC | |
| | CTGAAGAGCAAGCACGCCCCCCTGACCCCTAAGGAGGAGGAGTACCTGCA | |
| | GGCCCAGGTGCGGAGCAGATCCAAGCTGGATGCCCCTAAGGTGGACCTGC | |
| | TGGTGAAGAATTGTCTGCTGCCACTGCGGGAGTACTTCAAGTACTTTAGTC | |
| | AGAATAGCCTGCCACTGGGTGGACCTAGCTCTGGAGCCCCGCCTCCGTCAG | |
| | GTGGATCTCCTGCAGGTAGCCCAACTTCCACGGAAGAGGGCACGTCTGAG | |
| | AGTGCGACTCCTGAGAGCGGGCCTGGCACAAGTACTGAGCCCAGCGAAGG | |
| | TTCTGCACCCGGGTCTCCAGCTGGGAGCCCTACCTCAACAGAGGAAGGTAC | |
| | CAGCACAGAGCCTTCTGAGGGTAGCGCTCCTGGCACGTCCACCGAACCGTC | |
| | CGAGGGGATGGCACCGAAGAAAAAACGCAAAGTTGGTCGACTGGAACCG | |
| | GGTGAAAAACCCTACGCTTGTCCCGAGTGTGGGAAATCATTCTCAAGGGC | |
| | AGATAATCTTACGGAACATCAGCGCACACACACCGGGGAAAAACCCTATA | |
| | AGTGCCCTGAGTGTGGTAAATCATTCTCTACGTCAGGGTCATTGGTGCGCC | |
| | ATCAGAGGACCCATACAGGCGAAAAACCGTATAAGTGCCCCGAATGCGGT | |
| | AAAAGCTTCAGCAGAAAAGATAACTTGAAAAATCACCAACGCACTCACAC | |
| | GGGAGAAAAACCGTACGCATGCCCGGAGTGCGGCAAGAGTTTCAGTCAGA | |
| | GTAGCTCACTTGTTCGCCACCAAAGAACCCACACAGGCGAAAAGCCCTAC | |
| | AAGTGTCCTGAATGTGGAAAGAGTTTCAGTCGAAGTGATAAATTGGTTAG | |
| | GCACCAAAGAACACACACTGGAGAGAAACCGTACAAGTGTCCAGAATGTG | |
| | GCAAGTCTTTTTCTGATTCTGGAAATTTGCGCGTCCATCAAAGGACTCATA | |
| | CTGGGAAAAAGACGTCCGCTCCGGACCGAAAAAAAAGAGAAAGGTAAAC | |
| | GGCGGGGGAGGATCACGGACCCTGGTTACATTTAAGGACGTTTTTGTAGAC | |
| | TTCACGAGGGAGGAATGGAAGCTGTTGGACACCGCCCAGCAAATCGTGTA | |
| | TCGAAATGTAATGTTGGAAAATTATAAAAATCTGGTTTCCCTCGGCTACCA | |
| | ATTGACAAAACCAGACGTCATCCTCAGACTGGAAAAAGGGGAAGAACCTT | |
| | GGCTTGTCTGA | |
| 996 | ATGCACGATCAGGAGTTTGACCCCCCTAAGGTGTACCCACCCGTGCCAGCC | 3xFLAG- |
| | GAGAAGAGGAAGCCCATCCGCGTGCTGTCCCTGTTCGACGGCATCGCCAC | DNMT3AL- |
| | AGGCCTGCTGGTGCTGAAGGATCTGGGCATCCAGGTGGACAGATATATCG | XTEN80-SV40 |
| | CCTCCGAGGTGTGCGAGGATTCTATCACCGTGGGCATGGTGAGGCACCAG | NLS-ZFP-SV40 |
| | GGCAAGATCATGTACGTGGGCGACGTGCGCAGCGTGACACAGAAGCACAT | NLS-KRAB |
| | CCAGGAGTGGGGACCCTTCGACCTGGTCATCGGAGGCAGCCCCTGTAATG | (DNA sequence) |
| | ACCTGTCCATCGTGAACCCTGCAAGGAAGGGCCTGTATGAGGGAACCGGC | |
| | AGACTGTTCTTTGAGTTCTACAGGCTGCTGCACGACGCCCGCCCTAAGGAG | |
| | GGCGATGACAGGCCATTCTTTTGGCTGTTTGAGAACGTGGTGGCCATGGGC | |
| | GTGAGCGACAAGCGGGATATCTCCAGATTCCTGGAGTCTAATCCCGTGATG | |
| | ATCGATGCAAAGGAGGTGTCTGCCGCACACAGGGCAAGGTACTTTTGGGG | |
| | AAATCTGCCTGGCATGAACCGCCCACTGGCCAGCACCGTGAACGACAAGC | |
| | TGGAGCTGCAGGAGTGCCTGGAGCACGGAAGGATCGCCAAGTTCTCCAAG | |
| | GTGCGGACAATCACCACAAGATCTAACAGCATCAAGCAGGGCAAGGATCA | |
| | GCACTTCCCCGTGTTCATGAATGAGAAGGAGGACATCCTGTGGTGTACCGA | |
| | GATGGAGCGCGTGTTCGGCTTTCCAGTGCACTATACAGACGTGAGCAATAT | |
| | GAGCCGGCTGGCAAGGCAGAGACTGCTGGGCCGGTCCTGGTCTGTGCCAG | |
| | TGATCAGACACCTGTTCGCCCCCCTGAAGGAGTACTTTGCCTGCGTGTCTA | |
| | GCGGCAACTCTAATGCCAACAGCAGAGGCCCTTCCTTTTCCTCTGGCCTGG | |
| | TGCCACTGTCTCTGAGGGGCAGCCACATGGGCCCCATGGAGATCTACAAG | |
| | ACCGTGTCCGCCTGGAAGAGGCAGCCTGTGCGCGTGCTGTCTCTGTTCCGC | |
| | AACATCGACAAGGTGCTGAAGAGCCTGGGCTTTCTGGAGAGCGGATCCGG | |
| | ATCTGGAGGAGGCACCCTGAAGTATGTGGAGGATGTGACAAATGTGGTGC | |
| | GGAGAGATGTGGAGAAGTGGGGCCCCTTCGATCTGGTGTACGGATCCACC | |
| | CAGCCACTGGGAAGCTCCTGCGATAGGTGTCCAGGATGGTATATGTTCCAG | |
| | TTTCACAGAATCCTGCAGTACGCACTGCCAAGGCAGGAGAGCCAGCGCCC | |
| | TTTCTTTTGGATCTTTATGGACAACCTGCTGCTGACAGAGGATGACCAGGA | |
| | GACAACAACCCGCTTCCTGCAGACAGAGGCAGTGACCCTGCAGGATGTGA | |
| | GGGGACGCGACTATCAGAATGCCATGCGGGTGTGGTCTAACATCCCTGGC | |
| | CTGAAGAGCAAGCACGCCCCCCTGACCCCTAAGGAGGAGGAGTACCTGCA | |
| | GGCCCAGGTGCGGAGCAGATCCAAGCTGGATGCCCCTAAGGTGGACCTGC | |
| | TGGTGAAGAATTGTCTGCTGCCACTGCGGGAGTACTTCAAGTACTTTAGTC | |
| | AGAATAGCCTGCCACTGGGTGGACCTAGCTCTGGAGCCCCGCCTCCGTCAG | |
| | GTGGATCTCCTGCAGGTAGCCCAACTTCCACGGAAGAGGGCACGTCTGAG | |
| | AGTGCGACTCCTGAGAGCGGGCCTGGCACAAGTACTGAGCCCAGCGAAGG | |
| | TTCTGCACCCGGGTCTCCAGCTGGGAGCCCTACCTCAACAGAGGAAGGTAC | |
| | CAGCACAGAGCCTTCTGAGGGTAGCGCTCCTGGCACGTCCACCGAACCGTC | |
| | CGAGGGGATGGCACCGAAGAAAAAACGCAAAGTTGGTCGACTCGAACCA | |
| | GGGGAAAAGCCATACGCTTGCCCCGAGTGTGGAAAATCTTTCTCTCAGTCA | |
| | AGCTCCCTTGTCAGACACCAGAGAACCCATACGGGTGAGAAACCATACAA | |
| | GTGCCCAGAGTGCGGCAAAAGCTTCAGTCAGAGTGGCGATCTGCGCCGGC | |
| | ATCAAAGAACTCACACTGGAGAAAAGCCCTATAAGTGCCCCGAATGTGGA | |
| | AAGAGTTTTTCCAGGAGTGACGAAAGAAAGAGACACCAGCGGACTCACAC | |
| | CGGCGAGAAACCATACGCATGCCCCGAGTGCGGAAAAAGTTTTTCCCACC | |
| | GCACAACCCTTACCAATCATCAACGCACGCACACAGGGGAGAAACCCTAC | |
| | AAGTGCCCGGAGTGTGGCAAGTCATTCAGCCGAAGTGACCACCTCACTAA | |
| | CCACCAAAGGACTCACACAGGAGAAAAACCCTACAAATGTCCGGAGTGCG | |
| | GAAAATCTTTTTCCACGTCCGGTGAGCTGGTCCGCCATCAACGAACCCATA | |
| | CTGGTAAAAAAACTAGCGCTCCGGACCGAAAAAAAAGAGAAAGGTAAAC | |
| | GGCGGGGGAGGATCACGGACCCTGGTTACATTTAAGGACGTTTTTGTAGAC | |
| | TTCACGAGGGAGGAATGGAAGCTGTTGGACACCGCCCAGCAAATCGTGTA | |
| | TCGAAATGTAATGTTGGAAAATTATAAAAATCTGGTTTCCCTCGGCTACCA | |
| | ATTGACAAAACCAGACGTCATCCTCAGACTGGAAAAAGGGGAAGAACCTT | |
| | GGCTTGTCTGA | |
| 997 | ATGCACGATCAGGAGTTTGACCCCCCTAAGGTGTACCCACCCGTGCCAGCC | 3xFLAG- |
| | GAGAAGAGGAAGCCCATCCGCGTGCTGTCCCTGTTCGACGGCATCGCCAC | DNMT3AL- |
| | AGGCCTGCTGGTGCTGAAGGATCTGGGCATCCAGGTGGACAGATATATCG | XTEN80-SV40 |
| | CCTCCGAGGTGTGCGAGGATTCTATCACCGTGGGCATGGTGAGGCACCAG | NLS-ZFP-SV40 |
| | GGCAAGATCATGTACGTGGGCGACGTGCGCAGCGTGACACAGAAGCACAT | NLS-KRAB |
| | CCAGGAGTGGGGACCCTTCGACCTGGTCATCGGAGGCAGCCCCTGTAATG | (DNA sequence) |
| | ACCTGTCCATCGTGAACCCTGCAAGGAAGGGCCTGTATGAGGGAACCGGC | |
| | AGACTGTTCTTTGAGTTCTACAGGCTGCTGCACGACGCCCGCCCTAAGGAG | |
| | GGCGATGACAGGCCATTCTTTTGGCTGTTTGAGAACGTGGTGGCCATGGGC | |
| | GTGAGCGACAAGCGGGATATCTCCAGATTCCTGGAGTCTAATCCCGTGATG | |
| | ATCGATGCAAAGGAGGTGTCTGCCGCACACAGGGCAAGGTACTTTTGGGG | |
| | AAATCTGCCTGGCATGAACCGCCCACTGGCCAGCACCGTGAACGACAAGC | |
| | TGGAGCTGCAGGAGTGCCTGGAGCACGGAAGGATCGCCAAGTTCTCCAAG | |
| | GTGCGGACAATCACCACAAGATCTAACAGCATCAAGCAGGGCAAGGATCA | |
| | GCACTTCCCCGTGTTCATGAATGAGAAGGAGGACATCCTGTGGTGTACCGA | |
| | GATGGAGCGCGTGTTCGGCTTTCCAGTGCACTATACAGACGTGAGCAATAT | |
| | GAGCCGGCTGGCAAGGCAGAGACTGCTGGGCCGGTCCTGGTCTGTGCCAG | |
| | TGATCAGACACCTGTTCGCCCCCCTGAAGGAGTACTTTGCCTGCGTGTCTA | |
| | GCGGCAACTCTAATGCCAACAGCAGAGGCCCTTCCTTTTCCTCTGGCCTGG | |
| | TGCCACTGTCTCTGAGGGGCAGCCACATGGGCCCCATGGAGATCTACAAG | |
| | ACCGTGTCCGCCTGGAAGAGGCAGCCTGTGCGCGTGCTGTCTCTGTTCCGC | |
| | AACATCGACAAGGTGCTGAAGAGCCTGGGCTTTCTGGAGAGCGGATCCGG | |
| | ATCTGGAGGAGGCACCCTGAAGTATGTGGAGGATGTGACAAATGTGGTGC | |
| | GGAGAGATGTGGAGAAGTGGGGCCCCTTCGATCTGGTGTACGGATCCACC | |
| | CAGCCACTGGGAAGCTCCTGCGATAGGTGTCCAGGATGGTATATGTTCCAG | |
| | TTTCACAGAATCCTGCAGTACGCACTGCCAAGGCAGGAGAGCCAGCGCCC | |
| | TTTCTTTTGGATCTTTATGGACAACCTGCTGCTGACAGAGGATGACCAGGA | |
| | GACAACAACCCGCTTCCTGCAGACAGAGGCAGTGACCCTGCAGGATGTGA | |
| | GGGGACGCGACTATCAGAATGCCATGCGGGTGTGGTCTAACATCCCTGGC | |
| | CTGAAGAGCAAGCACGCCCCCCTGACCCCTAAGGAGGAGGAGTACCTGCA | |
| | GGCCCAGGTGCGGAGCAGATCCAAGCTGGATGCCCCTAAGGTGGACCTGC | |
| | TGGTGAAGAATTGTCTGCTGCCACTGCGGGAGTACTTCAAGTACTTTAGTC | |
| | AGAATAGCCTGCCACTGGGTGGACCTAGCTCTGGAGCCCCGCCTCCGTCAG | |
| | GTGGATCTCCTGCAGGTAGCCCAACTTCCACGGAAGAGGGCACGTCTGAG | |
| | AGTGCGACTCCTGAGAGCGGGCCTGGCACAAGTACTGAGCCCAGCGAAGG | |
| | TTCTGCACCCGGGTCTCCAGCTGGGAGCCCTACCTCAACAGAGGAAGGTAC | |
| | CAGCACAGAGCCTTCTGAGGGTAGCGCTCCTGGCACGTCCACCGAACCGTC | |
| | CGAGGGGATGGCACCGAAGAAAAAACGCAAAGTTGGTCGACTGGAACCC | |
| | GGGGAGAAGCCGTACGCTTGCCCAGAGTGCGGAAAGAGCTTCTCTCAGAG | |
| | CGGAGACCTTAGACGCCACCAGCGAACCCACACCGGCGAAAAACCGTATA | |
| | AATGCCCGGAATGCGGCAAGAGTTTTAGTCGGTCCGATGAGCGAAAGAGG | |
| | CATCAACGAACCCATACGGGAGAGAAACCCTACAAGTGCCCTGAGTGTGG | |
| | TAAGTCATTTTCCCACAGAACGACGTTGACGAATCACCAGAGAACCCATAC | |
| | GGGTGAGAAACCTTACGCTTGCCCGGAGTGCGGCAAAAGCTTCAGCCGGA | |
| | GTGATCACTTGACCAATCATCAGAGGACACACACGGGTGAGAAGCCCTAC | |
| | AAATGTCCCGAATGCGGCAAGTCTTTCTCAACGTCAGGCGAACTCGTCCGG | |
| | CACCAGCGAACACATACGGGAGAAAAGCCGTACAAATGTCCGGAATGCGG | |
| | AAAGTCATTTTCACGGTCAGATGACTTGGTGCGACACCAGCGCACTCACAC | |
| | AGGCAAGAAGACCTCAGCTCCGGACCGAAAAAAAAGAGAAAGGTAAACG | |
| | GCGGGGGAGGATCACGGACCCTGGTTACATTTAAGGACGTTTTTGTAGACT | |
| | TCACGAGGGAGGAATGGAAGCTGTTGGACACCGCCCAGCAAATCGTGTAT | |
| | CGAAATGTAATGTTGGAAAATTATAAAAATCTGGTTTCCCTCGGCTACCAA | |
| | TTGACAAAACCAGACGTCATCCTCAGACTGGAAAAAGGGGAAGAACCTTG | |
| | GCTTGTCTGA | |
| 998 | ATGCACGATCAGGAGTTTGACCCCCCTAAGGTGTACCCACCCGTGCCAGCC | 3xFLAG- |
| | GAGAAGAGGAAGCCCATCCGCGTGCTGTCCCTGTTCGACGGCATCGCCAC | DNMT3AL- |
| | AGGCCTGCTGGTGCTGAAGGATCTGGGCATCCAGGTGGACAGATATATCG | XTEN80-SV40 |
| | CCTCCGAGGTGTGCGAGGATTCTATCACCGTGGGCATGGTGAGGCACCAG | NLS-ZFP-SV40 |
| | GGCAAGATCATGTACGTGGGCGACGTGCGCAGCGTGACACAGAAGCACAT | NLS-KRAB |
| | CCAGGAGTGGGGACCCTTCGACCTGGTCATCGGAGGCAGCCCCTGTAATG | (DNA sequence) |
| | ACCTGTCCATCGTGAACCCTGCAAGGAAGGGCCTGTATGAGGGAACCGGC | |
| | AGACTGTTCTTTGAGTTCTACAGGCTGCTGCACGACGCCCGCCCTAAGGAG | |
| | GGCGATGACAGGCCATTCTTTTGGCTGTTTGAGAACGTGGTGGCCATGGGC | |
| | GTGAGCGACAAGCGGGATATCTCCAGATTCCTGGAGTCTAATCCCGTGATG | |
| | ATCGATGCAAAGGAGGTGTCTGCCGCACACAGGGCAAGGTACTTTTGGGG | |
| | AAATCTGCCTGGCATGAACCGCCCACTGGCCAGCACCGTGAACGACAAGC | |
| | TGGAGCTGCAGGAGTGCCTGGAGCACGGAAGGATCGCCAAGTTCTCCAAG | |
| | GTGCGGACAATCACCACAAGATCTAACAGCATCAAGCAGGGCAAGGATCA | |
| | GCACTTCCCCGTGTTCATGAATGAGAAGGAGGACATCCTGTGGTGTACCGA | |
| | GATGGAGCGCGTGTTCGGCTTTCCAGTGCACTATACAGACGTGAGCAATAT | |
| | GAGCCGGCTGGCAAGGCAGAGACTGCTGGGCCGGTCCTGGTCTGTGCCAG | |
| | TGATCAGACACCTGTTCGCCCCCCTGAAGGAGTACTTTGCCTGCGTGTCTA | |
| | GCGGCAACTCTAATGCCAACAGCAGAGGCCCTTCCTTTTCCTCTGGCCTGG | |
| | TGCCACTGTCTCTGAGGGGCAGCCACATGGGCCCCATGGAGATCTACAAG | |
| | ACCGTGTCCGCCTGGAAGAGGCAGCCTGTGCGCGTGCTGTCTCTGTTCCGC | |
| | AACATCGACAAGGTGCTGAAGAGCCTGGGCTTTCTGGAGAGCGGATCCGG | |
| | ATCTGGAGGAGGCACCCTGAAGTATGTGGAGGATGTGACAAATGTGGTGC | |
| | GGAGAGATGTGGAGAAGTGGGGCCCCTTCGATCTGGTGTACGGATCCACC | |
| | CAGCCACTGGGAAGCTCCTGCGATAGGTGTCCAGGATGGTATATGTTCCAG | |
| | TTTCACAGAATCCTGCAGTACGCACTGCCAAGGCAGGAGAGCCAGCGCCC | |
| | TTTCTTTTGGATCTTTATGGACAACCTGCTGCTGACAGAGGATGACCAGGA | |
| | GACAACAACCCGCTTCCTGCAGACAGAGGCAGTGACCCTGCAGGATGTGA | |
| | GGGGACGCGACTATCAGAATGCCATGCGGGTGTGGTCTAACATCCCTGGC | |
| | CTGAAGAGCAAGCACGCCCCCCTGACCCCTAAGGAGGAGGAGTACCTGCA | |
| | GGCCCAGGTGCGGAGCAGATCCAAGCTGGATGCCCCTAAGGTGGACCTGC | |
| | TGGTGAAGAATTGTCTGCTGCCACTGCGGGAGTACTTCAAGTACTTTAGTC | |
| | AGAATAGCCTGCCACTGGGTGGACCTAGCTCTGGAGCCCCGCCTCCGTCAG | |
| | GTGGATCTCCTGCAGGTAGCCCAACTTCCACGGAAGAGGGCACGTCTGAG | |
| | AGTGCGACTCCTGAGAGCGGGCCTGGCACAAGTACTGAGCCCAGCGAAGG | |
| | TTCTGCACCCGGGTCTCCAGCTGGGAGCCCTACCTCAACAGAGGAAGGTAC | |
| | CAGCACAGAGCCTTCTGAGGGTAGCGCTCCTGGCACGTCCACCGAACCGTC | |
| | CGAGGGGATGGCACCGAAGAAAAAACGCAAAGTTGGTCGACTGGAGCCTG | |
| | GTGAGAAGCCGTATGCATGTCCTGAGTGTGGGAAGTCATTTAGTCAGAGG | |
| | GCCCACTTGGAACGACACCAAAGGACCCACACTGGTGAAAAACCCTACAA | |
| | ATGCCCAGAGTGTGGTAAGTCTTTTTCACAGCTGGCCCACCTGAGAGCACA | |
| | CCAGCGAACTCATACGGGCGAGAAACCATACAAGTGTCCAGAGTGCGGAA | |
| | AGTCATTCTCAGATCCCGGCCACTTGGTGCGACATCAGAGAACGCACACA | |
| | GGGGAGAAGCCTTATGCTTGCCCGGAATGCGGGAAGTCTTTCAGCCGCCG | |
| | AAGTGCTTGTCGAAGGCACCAACGGACCCATACCGGTGAGAAACCATATA | |
| | AGTGCCCAGAGTGTGGAAAGAGTTTTAGTCGATCCGATCACCTGACTACGC | |
| | ACCAGCGGACGCACACAGGAGAGAAACCGTATAAGTGCCCTGAATGCGGT | |
| | AAGAGCTTCTCTCAATCAAGCTCACTGGTTAGGCACCAACGCACTCATACC | |
| | GGCAAGAAGACGTCAGCTCCGGACCGAAAAAAAAGAGAAAGGTAAACGG | |
| | CGGGGGAGGATCACGGACCCTGGTTACATTTAAGGACGTTTTTGTAGACTT | |
| | CACGAGGGAGGAATGGAAGCTGTTGGACACCGCCCAGCAAATCGTGTATC | |
| | GAAATGTAATGTTGGAAAATTATAAAAATCTGGTTTCCCTCGGCTACCAAT | |
| | TGACAAAACCAGACGTCATCCTCAGACTGGAAAAAGGGGAAGAACCTTGG | |
| | CTTGTCTGA | |
| 999 | ATGCACGATCAGGAGTTTGACCCCCCTAAGGTGTACCCACCCGTGCCAGCC | 3xFLAG- |
| | GAGAAGAGGAAGCCCATCCGCGTGCTGTCCCTGTTCGACGGCATCGCCAC | DNMT3AL- |
| | AGGCCTGCTGGTGCTGAAGGATCTGGGCATCCAGGTGGACAGATATATCG | XTEN80-SV40 |
| | CCTCCGAGGTGTGCGAGGATTCTATCACCGTGGGCATGGTGAGGCACCAG | NLS-ZFP-SV40 |
| | GGCAAGATCATGTACGTGGGCGACGTGCGCAGCGTGACACAGAAGCACAT | NLS-KRAB |
| | CCAGGAGTGGGGACCCTTCGACCTGGTCATCGGAGGCAGCCCCTGTAATG | (DNA sequence) |
| | ACCTGTCCATCGTGAACCCTGCAAGGAAGGGCCTGTATGAGGGAACCGGC | |
| | AGACTGTTCTTTGAGTTCTACAGGCTGCTGCACGACGCCCGCCCTAAGGAG | |
| | GGCGATGACAGGCCATTCTTTTGGCTGTTTGAGAACGTGGTGGCCATGGGC | |
| | GTGAGCGACAAGCGGGATATCTCCAGATTCCTGGAGTCTAATCCCGTGATG | |
| | ATCGATGCAAAGGAGGTGTCTGCCGCACACAGGGCAAGGTACTTTTGGGG | |
| | AAATCTGCCTGGCATGAACCGCCCACTGGCCAGCACCGTGAACGACAAGC | |
| | TGGAGCTGCAGGAGTGCCTGGAGCACGGAAGGATCGCCAAGTTCTCCAAG | |
| | GTGCGGACAATCACCACAAGATCTAACAGCATCAAGCAGGGCAAGGATCA | |
| | GCACTTCCCCGTGTTCATGAATGAGAAGGAGGACATCCTGTGGTGTACCGA | |
| | GATGGAGCGCGTGTTCGGCTTTCCAGTGCACTATACAGACGTGAGCAATAT | |
| | GAGCCGGCTGGCAAGGCAGAGACTGCTGGGCCGGTCCTGGTCTGTGCCAG | |
| | TGATCAGACACCTGTTCGCCCCCCTGAAGGAGTACTTTGCCTGCGTGTCTA | |
| | GCGGCAACTCTAATGCCAACAGCAGAGGCCCTTCCTTTTCCTCTGGCCTGG | |
| | TGCCACTGTCTCTGAGGGGCAGCCACATGGGCCCCATGGAGATCTACAAG | |
| | ACCGTGTCCGCCTGGAAGAGGCAGCCTGTGCGCGTGCTGTCTCTGTTCCGC | |
| | AACATCGACAAGGTGCTGAAGAGCCTGGGCTTTCTGGAGAGCGGATCCGG | |
| | ATCTGGAGGAGGCACCCTGAAGTATGTGGAGGATGTGACAAATGTGGTGC | |
| | GGAGAGATGTGGAGAAGTGGGGCCCCTTCGATCTGGTGTACGGATCCACC | |
| | CAGCCACTGGGAAGCTCCTGCGATAGGTGTCCAGGATGGTATATGTTCCAG | |
| | TTTCACAGAATCCTGCAGTACGCACTGCCAAGGCAGGAGAGCCAGCGCCC | |
| | TTTCTTTTGGATCTTTATGGACAACCTGCTGCTGACAGAGGATGACCAGGA | |
| | GACAACAACCCGCTTCCTGCAGACAGAGGCAGTGACCCTGCAGGATGTGA | |
| | GGGGACGCGACTATCAGAATGCCATGCGGGTGTGGTCTAACATCCCTGGC | |
| | CTGAAGAGCAAGCACGCCCCCCTGACCCCTAAGGAGGAGGAGTACCTGCA | |
| | GGCCCAGGTGCGGAGCAGATCCAAGCTGGATGCCCCTAAGGTGGACCTGC | |
| | TGGTGAAGAATTGTCTGCTGCCACTGCGGGAGTACTTCAAGTACTTTAGTC | |
| | AGAATAGCCTGCCACTGGGTGGACCTAGCTCTGGAGCCCCGCCTCCGTCAG | |
| | GTGGATCTCCTGCAGGTAGCCCAACTTCCACGGAAGAGGGCACGTCTGAG | |
| | AGTGCGACTCCTGAGAGCGGGCCTGGCACAAGTACTGAGCCCAGCGAAGG | |
| | TTCTGCACCCGGGTCTCCAGCTGGGAGCCCTACCTCAACAGAGGAAGGTAC | |
| | CAGCACAGAGCCTTCTGAGGGTAGCGCTCCTGGCACGTCCACCGAACCGTC | |
| | CGAGGGGATGGCACCGAAGAAAAAACGCAAAGTTGGTCGACTTGAGCCGG | |
| | GGGAAAAGCCTTATGCTTGCCCAGAGTGTGGCAAGAGCTTCTCCCAAAGTT | |
| | CAAACCTCGTCCGACACCAAAGGACTCACACGGGCGAAAAACCGTATAAA | |
| | TGCCCCGAGTGCGGAAAGTCATTTTCCAGGTCCGACGATCTGGTCCGCCAC | |
| | CAGCGCACTCATACGGGGGAAAAGCCCTATAAGTGCCCTGAGTGCGGCAA | |
| | GAGCTTCTCAACTCACCTGGATCTCATTCGCCATCAACGCACACATACAGG | |
| | GGAGAAGCCTTACGCTTGTCCAGAGTGCGGCAAGTCTTTCAGTACGAGCG | |
| | GAAACCTGACGGAACACCAGCGAACCCACACGGGCGAGAAGCCATATAA | |
| | ATGTCCCGAATGTGGAAAATCATTCTCTCGCCGATCTGCGTGCCGCCGGCA | |
| | TCAGAGGACACATACCGGAGAAAAGCCGTACAAATGCCCCGAGTGTGGAA | |
| | AATCCTTTAGCAGAAATGATACACTTACCGAGCATCAGAGGACGCACACT | |
| | GGAAAAAAGACATCTGCTCCGGACCGAAAAAAAAGAGAAAGGTAAACGG | |
| | CGGGGGAGGATCACGGACCCTGGTTACATTTAAGGACGTTTTTGTAGACTT | |
| | CACGAGGGAGGAATGGAAGCTGTTGGACACCGCCCAGCAAATCGTGTATC | |
| | GAAATGTAATGTTGGAAAATTATAAAAATCTGGTTTCCCTCGGCTACCAAT | |
| | TGACAAAACCAGACGTCATCCTCAGACTGGAAAAAGGGGAAGAACCTTGG | |
| | CTTGTCTGA | |
| 1000 | MHDQEFDPPKVYPPVPAEKRKPIRVLSLFDGIATGLLVLKDLGIQVDRYIASEV | 3xFLAG- |
| | CEDSITVGMVRHQGKIMYVGDVRSVTQKHIQEWGPFDLVIGGSPCNDLSIVNP | DNMT3AL- |
| | ARKGLYEGTGRLFFEFYRLLHDARPKEGDDRPFFWLFENVVAMGVSDKRDIS | XTEN80-SV40 |
| | RFLESNPVMIDAKEVSAAHRARYFWGNLPGMNRPLASTVNDKLELQECLEHG | NLS-ZFP-SV40 |
| | RIAKFSKVRTITTRSNSIKQGKDQHFPVFMNEKEDILWCTEMERVFGFPVHYT | NLS-KRAB (AA |
| | DVSNMSRLARQRLLGRSWSVPVIRHLFAPLKEYFACVSSGNSNANSRGPSFSS | sequence) |
| | GLVPLSLRGSHMGPMEIYKTVSAWKRQPVRVLSLFRNIDKVLKSLGFLESGSG | |
| | SGGGTLKYVEDVTNVVRRDVEKWGPFDLVYGSTQPLGSSCDRCPGWYMFQF | |
| | HRILQYALPRQESQRPFFWIFMDNLLLTEDDQETTTRFLQTEAVTLQDVRGRD | |
| | YQNAMRVWSNIPGLKSKHAPLTPKEEEYLQAQVRSRSKLDAPKVDLLVKNCL | |
| | LPLREYFKYFSQNSLPLGGPSSGAPPPSGGSPAGSPTSTEEGTSESATPESGPGTS | |
| | TEPSEGSAPGSPAGSPTSTEEGTSTEPSEGSAPGTSTEPSEGMAPKKKRKVGRV | |
| | PAAMAERPFQCRICMRNFSSEADRSRHIRTHTGEKPFACDICGRKFADRSNLTR | |
| | HTKIHTGSQKPFQCRICMRNFSQSSDLSRHIRTHTGEKPFACDICGRKFAYHWY | |
| | LKKHTKIHTGSQKPFQCRICMRNFSRSDSLSVHIRTHTGEKPFACDICGRKFAQ | |
| | NANRKTHTKIHLRQKDAARGSGPKKKRKVNGGGGSRTLVTFKDVFVDFTREE | |
| | WKLLDTAQQIVYRNVMLENYKNLVSLGYQLTKPDVILRLEKGEEPWLV | |
| 1001 | MHDQEFDPPKVYPPVPAEKRKPIRVLSLFDGIATGLLVLKDLGIQVDRYIASEV | 3xFLAG- |
| | CEDSITVGMVRHQGKIMYVGDVRSVTQKHIQEWGPFDLVIGGSPCNDLSIVNP | DNMT3AL- |
| | ARKGLYEGTGRLFFEFYRLLHDARPKEGDDRPFFWLFENVVAMGVSDKRDIS | XTEN80-SV40 |
| | RFLESNPVMIDAKEVSAAHRARYFWGNLPGMNRPLASTVNDKLELQECLEHG | NLS-ZFP-SV40 |
| | RIAKFSKVRTITTRSNSIKQGKDQHFPVFMNEKEDILWCTEMERVFGFPVHYT | NLS-KRAB (AA |
| | DVSNMSRLARQRLLGRSWSVPVIRHLFAPLKEYFACVSSGNSNANSRGPSFSS | sequence) |
| | GLVPLSLRGSHMGPMEIYKTVSAWKRQPVRVLSLFRNIDKVLKSLGFLESGSG | |
| | SGGGTLKYVEDVTNVVRRDVEKWGPFDLVYGSTQPLGSSCDRCPGWYMFQF | |
| | HRILQYALPRQESQRPFFWIFMDNLLLTEDDQETTTRFLQTEAVTLQDVRGRD | |
| | YQNAMRVWSNIPGLKSKHAPLTPKEEEYLQAQVRSRSKLDAPKVDLLVKNCL | |
| | LPLREYFKYFSQNSLPLGGPSSGAPPPSGGSPAGSPTSTEEGTSESATPESGPGTS | |
| | TEPSEGSAPGSPAGSPTSTEEGTSTEPSEGSAPGTSTEPSEGMAPKKKRKVGRV | |
| | PAAMAERPFQCRICMRNFSRSDVLSTHIRTHTGEKPFACDICGKKFADNSSRTR | |
| | HTKIHTGSQKPFQCRICMRNFSRPYTLRLHIRTHTGEKPFACDICGRKFADSSH | |
| | RTRHTKIHTGSQKPFQCRICMRNFSRSDHLSQHIRTHTGEKPFACDICGRKFAD | |
| | SSHRTRHTKIHLRQKDAARGSGPKKKRKVNGGGGSRTLVTFKDVFVDFTREE | |
| | WKLLDTAQQIVYRNVMLENYKNLVSLGYQLTKPDVILRLEKGEEPWLV | |
| 1002 | MHDQEFDPPKVYPPVPAEKRKPIRVLSLFDGIATGLLVLKDLGIQVDRYIASEV | 3xFLAG- |
| | CEDSITVGMVRHQGKIMYVGDVRSVTQKHIQEWGPFDLVIGGSPCNDLSIVNP | DNMT3AL- |
| | ARKGLYEGTGRLFFEFYRLLHDARPKEGDDRPFFWLFENVVAMGVSDKRDIS | XTEN80-SV40 |
| | RFLESNPVMIDAKEVSAAHRARYFWGNLPGMNRPLASTVNDKLELQECLEHG | NLS-ZFP-SV40 |
| | RIAKFSKVRTITTRSNSIKQGKDQHFPVFMNEKEDILWCTEMERVFGFPVHYT | NLS-KRAB (AA |
| | DVSNMSRLARQRLLGRSWSVPVIRHLFAPLKEYFACVSSGNSNANSRGPSFSS | sequence) |
| | GLVPLSLRGSHMGPMEIYKTVSAWKRQPVRVLSLFRNIDKVLKSLGFLESGSG | |
| | SGGGTLKYVEDVTNVVRRDVEKWGPFDLVYGSTQPLGSSCDRCPGWYMFQF | |
| | HRILQYALPRQESQRPFFWIFMDNLLLTEDDQETTTRFLQTEAVTLQDVRGRD | |
| | YQNAMRVWSNIPGLKSKHAPLTPKEEEYLQAQVRSRSKLDAPKVDLLVKNCL | |
| | LPLREYFKYFSQNSLPLGGPSSGAPPPSGGSPAGSPTSTEEGTSESATPESGPGTS | |
| | TEPSEGSAPGSPAGSPTSTEEGTSTEPSEGSAPGTSTEPSEGMAPKKKRKVGRV | |
| | PAAMAERPFQCRICMRNFSRSDHLSQHIRTHTGEKPFACDICGRKFAQSADRT | |
| | KHTKIHTGSQKPFQCRICMRNFSRSDHLSQHIRTHTGEKPFACDICGRKFARRS | |
| | DLKRHTKIHTGSQKPFQCRICMRNFSRSDHLSRHIRTHTGEKPFACDICGRKFA | |
| | QSSDLRRHTKIHLRQKDAARGSGPKKKRKVNGGGGSRTLVTFKDVFVDFTRE | |
| | EWKLLDTAQQIVYRNVMLENYKNLVSLGYQLTKPDVILRLEKGEEPWLV | |
| 1003 | MHDQEFDPPKVYPPVPAEKRKPIRVLSLFDGIATGLLVLKDLGIQVDRYIASEV | 3xFLAG- |
| | CEDSITVGMVRHQGKIMYVGDVRSVTQKHIQEWGPFDLVIGGSPCNDLSIVNP | DNMT3AL- |
| | ARKGLYEGTGRLFFEFYRLLHDARPKEGDDRPFFWLFENVVAMGVSDKRDIS | XTEN80-SV40 |
| | RFLESNPVMIDAKEVSAAHRARYFWGNLPGMNRPLASTVNDKLELQECLEHG | NLS-ZFP-SV40 |
| | RIAKFSKVRTITTRSNSIKQGKDQHFPVFMNEKEDILWCTEMERVFGFPVHYT | NLS-KRAB (AA |
| | DVSNMSRLARQRLLGRSWSVPVIRHLFAPLKEYFACVSSGNSNANSRGPSFSS | sequence) |
| | GLVPLSLRGSHMGPMEIYKTVSAWKRQPVRVLSLFRNIDKVLKSLGFLESGSG | |
| | SGGGTLKYVEDVTNVVRRDVEKWGPFDLVYGSTQPLGSSCDRCPGWYMFQF | |
| | HRILQYALPRQESQRPFFWIFMDNLLLTEDDQETTTRFLQTEAVTLQDVRGRD | |
| | YQNAMRVWSNIPGLKSKHAPLTPKEEEYLQAQVRSRSKLDAPKVDLLVKNCL | |
| | LPLREYFKYFSQNSLPLGGPSSGAPPPSGGSPAGSPTSTEEGTSESATPESGPGTS | |
| | TEPSEGSAPGSPAGSPTSTEEGTSTEPSEGSAPGTSTEPSEGMAPKKKRKVGRV | |
| | PAAMAERPFQCRICMRNFSRSDNLSEHIRTHTGEKPFACDICGRKFATSSNRKT | |
| | HTKIHTGSQKPFQCRICMRNFSDRSHLTRHIRTHTGEKPFACDICGRKFARSDA | |
| | LTQHTKIHTGSQKPFQCRICMRNFSDRSALARHIRTHTGEKPFACDICGRKFAR | |
| | RFTLSKHTKIHLRQKDAARGSGPKKKRKVNGGGGSRTLVTFKDVFVDFTREE | |
| | WKLLDTAQQIVYRNVMLENYKNLVSLGYQLTKPDVILRLEKGEEPWLV | |
| 1004 | MHDQEFDPPKVYPPVPAEKRKPIRVLSLFDGIATGLLVLKDLGIQVDRYIASEV | 3xFLAG- |
| | CEDSITVGMVRHQGKIMYVGDVRSVTQKHIQEWGPFDLVIGGSPCNDLSIVNP | DNMT3AL- |
| | ARKGLYEGTGRLFFEFYRLLHDARPKEGDDRPFFWLFENVVAMGVSDKRDIS | XTEN80-SV40 |
| | RFLESNPVMIDAKEVSAAHRARYFWGNLPGMNRPLASTVNDKLELQECLEHG | NLS-ZFP-SV40 |
| | RIAKFSKVRTITTRSNSIKQGKDQHFPVFMNEKEDILWCTEMERVFGFPVHYT | NLS-KRAB (AA |
| | DVSNMSRLARQRLLGRSWSVPVIRHLFAPLKEYFACVSSGNSNANSRGPSFSS | sequence) |
| | GLVPLSLRGSHMGPMEIYKTVSAWKRQPVRVLSLFRNIDKVLKSLGFLESGSG | |
| | SGGGTLKYVEDVTNVVRRDVEKWGPFDLVYGSTQPLGSSCDRCPGWYMFQF | |
| | HRILQYALPRQESQRPFFWIFMDNLLLTEDDQETTTRFLQTEAVTLQDVRGRD | |
| | YQNAMRVWSNIPGLKSKHAPLTPKEEEYLQAQVRSRSKLDAPKVDLLVKNCL | |
| | LPLREYFKYFSQNSLPLGGPSSGAPPPSGGSPAGSPTSTEEGTSESATPESGPGTS | |
| | TEPSEGSAPGSPAGSPTSTEEGTSTEPSEGSAPGTSTEPSEGMAPKKKRKVGRV | |
| | PAAMAERPFQCRICMRNFSRSDHLSEHIRTHTGEKPFACDICGRKFAQYSGRY | |
| | YHTKIHTGSQKPFQCRICMRNFSHGQTLNEHIRTHTGEKPFACDICGRKFAQSG | |
| | NLARHTKIHTGSQKPFQCRICMRNFSRSDSLLRHIRTHTGEKPFACDICGRKFA | |
| | CREYRGKHTKIHLRQKDAARGSGPKKKRKVNGGGGSRTLVTFKDVFVDFTRE | |
| | EWKLLDTAQQIVYRNVMLENYKNLVSLGYQLTKPDVILRLEKGEEPWLV | |
| 1005 | MHDQEFDPPKVYPPVPAEKRKPIRVLSLFDGIATGLLVLKDLGIQVDRYIASEV | 3xFLAG- |
| | CEDSITVGMVRHQGKIMYVGDVRSVTQKHIQEWGPFDLVIGGSPCNDLSIVNP | DNMT3AL- |
| | ARKGLYEGTGRLFFEFYRLLHDARPKEGDDRPFFWLFENVVAMGVSDKRDIS | XTEN80-SV40 |
| | RFLESNPVMIDAKEVSAAHRARYFWGNLPGMNRPLASTVNDKLELQECLEHG | NLS-ZFP-SV40 |
| | RIAKFSKVRTITTRSNSIKQGKDQHFPVFMNEKEDILWCTEMERVFGFPVHYT | NLS-KRAB (AA |
| | DVSNMSRLARQRLLGRSWSVPVIRHLFAPLKEYFACVSSGNSNANSRGPSFSS | sequence) |
| | GLVPLSLRGSHMGPMEIYKTVSAWKRQPVRVLSLFRNIDKVLKSLGFLESGSG | |
| | SGGGTLKYVEDVTNVVRRDVEKWGPFDLVYGSTQPLGSSCDRCPGWYMFQF | |
| | HRILQYALPRQESQRPFFWIFMDNLLLTEDDQETTTRFLQTEAVTLQDVRGRD | |
| | YQNAMRVWSNIPGLKSKHAPLTPKEEEYLQAQVRSRSKLDAPKVDLLVKNCL | |
| | LPLREYFKYFSQNSLPLGGPSSGAPPPSGGSPAGSPTSTEEGTSESATPESGPGTS | |
| | TEPSEGSAPGSPAGSPTSTEEGTSTEPSEGSAPGTSTEPSEGMAPKKKRKVGRV | |
| | PAAMAERPFQCRICMRNFSQSANRTTHIRTHTGEKPFACDICGRKFARSANLT | |
| | RHTKIHTGSQKPFQCRICMRNFSRSDVLSEHIRTHTGEKPFACDICGRKFATSG | |
| | HLSRHTKIHTGSQKPFQCRICMRNFSQSSDLSRHIRTHTGEKPFACDICGRKFA | |
| | QWSTRKRHTKIHLRQKDAARGSGPKKKRKVNGGGGSRTLVTFKDVFVDFTR | |
| | EEWKLLDTAQQIVYRNVMLENYKNLVSLGYQLTKPDVILRLEKGEEPWLV | |
| 1006 | MHDQEFDPPKVYPPVPAEKRKPIRVLSLFDGIATGLLVLKDLGIQVDRYIASEV | |
| | CEDSITVGMVRHQGKIMYVGDVRSVTQKHIQEWGPFDLVIGGSPCNDLSIVNP | |
| | ARKGLYEGTGRLFFEFYRLLHDARPKEGDDRPFFWLFENVVAMGVSDKRDIS | |
| | RFLESNPVMIDAKEVSAAHRARYFWGNLPGMNRPLASTVNDKLELQECLEHG | 3xFLAG- |
| | RIAKFSKVRTITTRSNSIKQGKDQHFPVFMNEKEDILWCTEMERVFGFPVHYT | DNMT3AL- |
| | DVSNMSRLARQRLLGRSWSVPVIRHLFAPLKEYFACVSSGNSNANSRGPSFSS | XTEN80-SV40 |
| | GLVPLSLRGSHMGPMEIYKTVSAWKRQPVRVLSLFRNIDKVLKSLGFLESGSG | NLS-ZFP-SV40 |
| | SGGGTLKYVEDVTNVVRRDVEKWGPFDLVYGSTQPLGSSCDRCPGWYMFQF | NLS-KRAB (AA |
| | HRILQYALPRQESQRPFFWIFMDNLLLTEDDQETTTRFLQTEAVTLQDVRGRD | sequence) |
| | YQNAMRVWSNIPGLKSKHAPLTPKEEEYLQAQVRSRSKLDAPKVDLLVKNCL | |
| | LPLREYFKYFSQNSLPLGGPSSGAPPPSGGSPAGSPTSTEEGTSESATPESGPGTS | |
| | TEPSEGSAPGSPAGSPTSTEEGTSTEPSEGSAPGTSTEPSEGMAPKKKRKVGRV | |
| | PAAMAERPFQCRICMRNFSQSGNLARHIRTHTGEKPFACDICGRKFAATCCLA | |
| | HHTKIHTGSQKPFQCRICMRNFSRWQYLPTHIRTHAGEKPFACDICGRKFADR | |
| | SALARHTKIHTGSQKPFQCRICMRNFSRSDNLSEHIRTHTGEKPFACDICGRKF | |
| | AKRCNLRCHTKIHLRQKDAARGSGPKKKRKVNGGGGSRTLVTFKDVFVDFTR | |
| | EEWKLLDTAQQIVYRNVMLENYKNLVSLGYQLTKPDVILRLEKGEEPWLV | |
| 1007 | MHDQEFDPPKVYPPVPAEKRKPIRVLSLFDGIATGLLVLKDLGIQVDRYIASEV | 3xFLAG- |
| | CEDSITVGMVRHQGKIMYVGDVRSVTQKHIQEWGPFDLVIGGSPCNDLSIVNP | DNMT3AL- |
| | ARKGLYEGTGRLFFEFYRLLHDARPKEGDDRPFFWLFENVVAMGVSDKRDIS | XTEN80-SV40 |
| | RFLESNPVMIDAKEVSAAHRARYFWGNLPGMNRPLASTVNDKLELQECLEHG | NLS-ZFP-SV40 |
| | RIAKFSKVRTITTRSNSIKQGKDQHFPVFMNEKEDILWCTEMERVFGFPVHYT | NLS-KRAB (AA |
| | DVSNMSRLARQRLLGRSWSVPVIRHLFAPLKEYFACVSSGNSNANSRGPSFSS | sequence) |
| | GLVPLSLRGSHMGPMEIYKTVSAWKRQPVRVLSLFRNIDKVLKSLGFLESGSG | |
| | SGGGTLKYVEDVTNVVRRDVEKWGPFDLVYGSTQPLGSSCDRCPGWYMFQF | |
| | HRILQYALPRQESQRPFFWIFMDNLLLTEDDQETTTRFLQTEAVTLQDVRGRD | |
| | YQNAMRVWSNIPGLKSKHAPLTPKEEEYLQAQVRSRSKLDAPKVDLLVKNCL | |
| | LPLREYFKYFSQNSLPLGGPSSGAPPPSGGSPAGSPTSTEEGTSESATPESGPGTS | |
| | TEPSEGSAPGSPAGSPTSTEEGTSTEPSEGSAPGTSTEPSEGMAPKKKRKVGRV | |
| | PAAMAERPFQCRICMRNFSNPANLTRHIRTHTGEKPFACDICGRKFAQNATRT | |
| | KHTKIHTGSQKPFQCRICMRNFSQSGHLARHIRTHTGEKPFACDICGRKFANRH | |
| | DRAKHTKIHTGSQKPFQCRICMRNFSRSDHLSEHIRTHTGEKPFACDICGRKFA | |
| | QRRSRYKHTKIHLRQKDAARGSGPKKKRKVNGGGGSRTLVTFKDVFVDFTRE | |
| | EWKLLDTAQQIVYRNVMLENYKNLVSLGYQLTKPDVILRLEKGEEPWLV | |
| 1008 | MHDQEFDPPKVYPPVPAEKRKPIRVLSLFDGIATGLLVLKDLGIQVDRYIASEV | 3xFLAG- |
| | CEDSITVGMVRHQGKIMYVGDVRSVTQKHIQEWGPFDLVIGGSPCNDLSIVNP | DNMT3AL- |
| | ARKGLYEGTGRLFFEFYRLLHDARPKEGDDRPFFWLFENVVAMGVSDKRDIS | XTEN80-SV40 |
| | RFLESNPVMIDAKEVSAAHRARYFWGNLPGMNRPLASTVNDKLELQECLEHG | NLS-ZFP-SV40 |
| | RIAKFSKVRTITTRSNSIKQGKDQHFPVFMNEKEDILWCTEMERVFGFPVHYT | NLS-KRAB (AA |
| | DVSNMSRLARQRLLGRSWSVPVIRHLFAPLKEYFACVSSGNSNANSRGPSFSS | sequence) |
| | GLVPLSLRGSHMGPMEIYKTVSAWKRQPVRVLSLFRNIDKVLKSLGFLESGSG | |
| | SGGGTLKYVEDVTNVVRRDVEKWGPFDLVYGSTQPLGSSCDRCPGWYMFQF | |
| | HRILQYALPRQESQRPFFWIFMDNLLLTEDDQETTTRFLQTEAVTLQDVRGRD | |
| | YQNAMRVWSNIPGLKSKHAPLTPKEEEYLQAQVRSRSKLDAPKVDLLVKNCL | |
| | LPLREYFKYFSQNSLPLGGPSSGAPPPSGGSPAGSPTSTEEGTSESATPESGPGTS | |
| | TEPSEGSAPGSPAGSPTSTEEGTSTEPSEGSAPGTSTEPSEGMAPKKKRKVGRV | |
| | PAAMAERPFQCRICMRNFSQSSDLSRHIRTHTGEKPFACDICGRKFAHRSTRNR | |
| | HTKIHTGSQKPFQCRICMRNFSRSDVLSAHIRTHTGEKPFACDICGRKFADSRT | |
| | RKNHTKIHTGSQKPFQCRICMRNFSQSGSLTRHIRTHTGEKPFACDICGRKFAD | |
| | QSGLAHHTKIHLRQKDAARGSGPKKKRKVNGGGGSRTLVTFKDVFVDFTREE | |
| | WKLLDTAQQIVYRNVMLENYKNLVSLGYQLTKPDVILRLEKGEEPWLV | |
| 1009 | MHDQEFDPPKVYPPVPAEKRKPIRVLSLFDGIATGLLVLKDLGIQVDRYIASEV | 3xFLAG- |
| | CEDSITVGMVRHQGKIMYVGDVRSVTQKHIQEWGPFDLVIGGSPCNDLSIVNP | DNMT3AL- |
| | ARKGLYEGTGRLFFEFYRLLHDARPKEGDDRPFFWLFENVVAMGVSDKRDIS | XTEN80-SV40 |
| | RFLESNPVMIDAKEVSAAHRARYFWGNLPGMNRPLASTVNDKLELQECLEHG | NLS-ZFP-SV40 |
| | RIAKFSKVRTITTRSNSIKQGKDQHFPVFMNEKEDILWCTEMERVFGFPVHYT | NLS-KRAB (AA |
| | DVSNMSRLARQRLLGRSWSVPVIRHLFAPLKEYFACVSSGNSNANSRGPSFSS | sequence) |
| | GLVPLSLRGSHMGPMEIYKTVSAWKRQPVRVLSLFRNIDKVLKSLGFLESGSG | |
| | SGGGTLKYVEDVTNVVRRDVEKWGPFDLVYGSTQPLGSSCDRCPGWYMFQF | |
| | HRILQYALPRQESQRPFFWIFMDNLLLTEDDQETTTRFLQTEAVTLQDVRGRD | |
| | YQNAMRVWSNIPGLKSKHAPLTPKEEEYLQAQVRSRSKLDAPKVDLLVKNCL | |
| | LPLREYFKYFSQNSLPLGGPSSGAPPPSGGSPAGSPTSTEEGTSESATPESGPGTS | |
| | TEPSEGSAPGSPAGSPTSTEEGTSTEPSEGSAPGTSTEPSEGMAPKKKRKVGRV | |
| | PAAMAERPFQCRICMRNFSQNPAQWRHIRTHTGEKPFACDICGRKFARSADLS | |
| | RHTKIHTGSQKPFQCRICMRNFSTSGSLSRHIRTHTGEKPFACDICGRKFARSD | |
| | HLSRHTKIHTGSQKPFQCRICMRNFSRSDSLLRHIRTHTGEKPFACDICGRKFA | |
| | QSYDRFQHTKIHLRQKDAARGSGPKKKRKVNGGGGSRTLVTFKDVFVDFTRE | |
| | EWKLLDTAQQIVYRNVMLENYKNLVSLGYQLTKPDVILRLEKGEEPWLV | |
| 1010 | MHDQEFDPPKVYPPVPAEKRKPIRVLSLFDGIATGLLVLKDLGIQVDRYIASEV | 3xFLAG- |
| | CEDSITVGMVRHQGKIMYVGDVRSVTQKHIQEWGPFDLVIGGSPCNDLSIVNP | DNMT3AL- |
| | ARKGLYEGTGRLFFEFYRLLHDARPKEGDDRPFFWLFENVVAMGVSDKRDIS | XTEN80-SV40 |
| | RFLESNPVMIDAKEVSAAHRARYFWGNLPGMNRPLASTVNDKLELQECLEHG | NLS-ZFP-SV40 |
| | RIAKFSKVRTITTRSNSIKQGKDQHFPVFMNEKEDILWCTEMERVFGFPVHYT | NLS-KRAB (AA |
| | DVSNMSRLARQRLLGRSWSVPVIRHLFAPLKEYFACVSSGNSNANSRGPSFSS | sequence) |
| | GLVPLSLRGSHMGPMEIYKTVSAWKRQPVRVLSLFRNIDKVLKSLGFLESGSG | |
| | SGGGTLKYVEDVTNVVRRDVEKWGPFDLVYGSTQPLGSSCDRCPGWYMFQF | |
| | HRILQYALPRQESQRPFFWIFMDNLLLTEDDQETTTRFLQTEAVTLQDVRGRD | |
| | YQNAMRVWSNIPGLKSKHAPLTPKEEEYLQAQVRSRSKLDAPKVDLLVKNCL | |
| | LPLREYFKYFSQNSLPLGGPSSGAPPPSGGSPAGSPTSTEEGTSESATPESGPGTS | |
| | TEPSEGSAPGSPAGSPTSTEEGTSTEPSEGSAPGTSTEPSEGMAPKKKRKVGRV | |
| | PAAMAERPFQCRICMRNFSTSGSLSRHIRTHTGEKPFACDICGRKFARSDHLSR | |
| | HTKIHTGSQKPFQCRICMRNFSRSDSLLRHIRTHTGEKPFACDICGRKFAQSYD | |
| | RFQHTKIHTGSQKPFQCRICMRNFSRSDNLSTHIRTHTGEKPFACDICGRKFAD | |
| | NRDRIKHTKIHLRQKDAARGSGPKKKRKVNGGGGSRTLVTFKDVFVDFTREE | |
| | WKLLDTAQQIVYRNVMLENYKNLVSLGYQLTKPDVILRLEKGEEPWLV | |
| 1011 | MHDQEFDPPKVYPPVPAEKRKPIRVLSLFDGIATGLLVLKDLGIQVDRYIASEV | 3xFLAG- |
| | CEDSITVGMVRHQGKIMYVGDVRSVTQKHIQEWGPFDLVIGGSPCNDLSIVNP | DNMT3AL- |
| | ARKGLYEGTGRLFFEFYRLLHDARPKEGDDRPFFWLFENVVAMGVSDKRDIS | XTEN80-SV40 |
| | RFLESNPVMIDAKEVSAAHRARYFWGNLPGMNRPLASTVNDKLELQECLEHG | NLS-ZFP-SV40 |
| | RIAKFSKVRTITTRSNSIKQGKDQHFPVFMNEKEDILWCTEMERVFGFPVHYT | NLS-KRAB (AA |
| | DVSNMSRLARQRLLGRSWSVPVIRHLFAPLKEYFACVSSGNSNANSRGPSFSS | sequence) |
| | GLVPLSLRGSHMGPMEIYKTVSAWKRQPVRVLSLFRNIDKVLKSLGFLESGSG | |
| | SGGGTLKYVEDVTNVVRRDVEKWGPFDLVYGSTQPLGSSCDRCPGWYMFQF | |
| | HRILQYALPRQESQRPFFWIFMDNLLLTEDDQETTTRFLQTEAVTLQDVRGRD | |
| | YQNAMRVWSNIPGLKSKHAPLTPKEEEYLQAQVRSRSKLDAPKVDLLVKNCL | |
| | LPLREYFKYFSQNSLPLGGPSSGAPPPSGGSPAGSPTSTEEGTSESATPESGPGTS | |
| | TEPSEGSAPGSPAGSPTSTEEGTSTEPSEGSAPGTSTEPSEGMAPKKKRKVGRV | |
| | PAAMAERPFQCRICMRNFSDRSNLSRHIRTHTGEKPFACDICGRKFALRQNLIM | |
| | HTKIHTGSQKPFQCRICMRNFSERGTLARHIRTHTGEKPFACDICGRKFARSDA | |
| | LTQHTKIHTGSQKPFQCRICMRNFSRSDSLSQHIRTHTGEKPFACDICGRKFAR | |
| | KADRTRHTKIHLRQKDAARGSGPKKKRKVNGGGGSRTLVTFKDVFVDFTREE | |
| | WKLLDTAQQIVYRNVMLENYKNLVSLGYQLTKPDVILRLEKGEEPWLV | |
| 1012 | MHDQEFDPPKVYPPVPAEKRKPIRVLSLFDGIATGLLVLKDLGIQVDRYIASEV | 3xFLAG- |
| | CEDSITVGMVRHQGKIMYVGDVRSVTQKHIQEWGPFDLVIGGSPCNDLSIVNP | DNMT3AL- |
| | ARKGLYEGTGRLFFEFYRLLHDARPKEGDDRPFFWLFENVVAMGVSDKRDIS | XTEN80-SV40 |
| | RFLESNPVMIDAKEVSAAHRARYFWGNLPGMNRPLASTVNDKLELQECLEHG | NLS-ZFP-SV40 |
| | RIAKFSKVRTITTRSNSIKQGKDQHFPVFMNEKEDILWCTEMERVFGFPVHYT | NLS-KRAB (AA |
| | DVSNMSRLARQRLLGRSWSVPVIRHLFAPLKEYFACVSSGNSNANSRGPSFSS | sequence) |
| | GLVPLSLRGSHMGPMEIYKTVSAWKRQPVRVLSLFRNIDKVLKSLGFLESGSG | |
| | SGGGTLKYVEDVTNVVRRDVEKWGPFDLVYGSTQPLGSSCDRCPGWYMFQF | |
| | HRILQYALPRQESQRPFFWIFMDNLLLTEDDQETTTRFLQTEAVTLQDVRGRD | |
| | YQNAMRVWSNIPGLKSKHAPLTPKEEEYLQAQVRSRSKLDAPKVDLLVKNCL | |
| | LPLREYFKYFSQNSLPLGGPSSGAPPPSGGSPAGSPTSTEEGTSESATPESGPGTS | |
| | TEPSEGSAPGSPAGSPTSTEEGTSTEPSEGSAPGTSTEPSEGMAPKKKRKVGRV | |
| | PAAMAERPFQCRICMRNFSQYCCLTNHIRTHTGEKPFACDICGRKFATSGNLT | |
| | RHTKIHTGSQKPFQCRICMRNFSQSSDLSRHIRTHTGEKPFACDICGRKFAFRY | |
| | YLKRHTKIHTGSQKPFQCRICMRNFSQSGDLTRHIRTHTGEKPFACDICGRKFA | |
| | DKGNLTKHTKIHLRQKDAARGSGPKKKRKVNGGGGSRTLVTFKDVFVDFTRE | |
| | EWKLLDTAQQIVYRNVMLENYKNLVSLGYQLTKPDVILRLEKGEEPWLV | |
| 1013 | MHDQEFDPPKVYPPVPAEKRKPIRVLSLFDGIATGLLVLKDLGIQVDRYIASEV | 3xFLAG- |
| | CEDSITVGMVRHQGKIMYVGDVRSVTQKHIQEWGPFDLVIGGSPCNDLSIVNP | DNMT3AL- |
| | ARKGLYEGTGRLFFEFYRLLHDARPKEGDDRPFFWLFENVVAMGVSDKRDIS | XTEN80-SV40 |
| | RFLESNPVMIDAKEVSAAHRARYFWGNLPGMNRPLASTVNDKLELQECLEHG | NLS-ZFP-SV40 |
| | RIAKFSKVRTITTRSNSIKQGKDQHFPVFMNEKEDILWCTEMERVFGFPVHYT | NLS-KRAB (AA |
| | DVSNMSRLARQRLLGRSWSVPVIRHLFAPLKEYFACVSSGNSNANSRGPSFSS | sequence) |
| | GLVPLSLRGSHMGPMEIYKTVSAWKRQPVRVLSLFRNIDKVLKSLGFLESGSG | |
| | SGGGTLKYVEDVTNVVRRDVEKWGPFDLVYGSTQPLGSSCDRCPGWYMFQF | |
| | HRILQYALPRQESQRPFFWIFMDNLLLTEDDQETTTRFLQTEAVTLQDVRGRD | |
| | YQNAMRVWSNIPGLKSKHAPLTPKEEEYLQAQVRSRSKLDAPKVDLLVKNCL | |
| | LPLREYFKYFSQNSLPLGGPSSGAPPPSGGSPAGSPTSTEEGTSESATPESGPGTS | |
| | TEPSEGSAPGSPAGSPTSTEEGTSTEPSEGSAPGTSTEPSEGMAPKKKRKVGRV | |
| | PAAMAERPFQCRICMRNFSTSGSLSRHIRTHTGEKPFACDICGRKFARSDNLTT | |
| | HTKIHTGSQKPFQCRICMRNFSQSGNLARHIRTHTGEKPFACDICGRKFADRTT | |
| | LMRHTKIHTGSQKPFQCRICMRNFSQSGHLARHIRTHTGEKPFACDICGRKFA | |
| | QLTHLNSHTKIHLRQKDAARGSGPKKKRKVNGGGGSRTLVTFKDVFVDFTRE | |
| | EWKLLDTAQQIVYRNVMLENYKNLVSLGYQLTKPDVILRLEKGEEPWLV | |
| 1014 | MHDQEFDPPKVYPPVPAEKRKPIRVLSLFDGIATGLLVLKDLGIQVDRYIASEV | 3xFLAG- |
| | CEDSITVGMVRHQGKIMYVGDVRSVTQKHIQEWGPFDLVIGGSPCNDLSIVNP | DNMT3AL- |
| | ARKGLYEGTGRLFFEFYRLLHDARPKEGDDRPFFWLFENVVAMGVSDKRDIS | XTEN80-SV40 |
| | RFLESNPVMIDAKEVSAAHRARYFWGNLPGMNRPLASTVNDKLELQECLEHG | NLS-ZFP-SV40 |
| | RIAKFSKVRTITTRSNSIKQGKDQHFPVFMNEKEDILWCTEMERVFGFPVHYT | NLS-KRAB (AA |
| | DVSNMSRLARQRLLGRSWSVPVIRHLFAPLKEYFACVSSGNSNANSRGPSFSS | sequence) |
| | GLVPLSLRGSHMGPMEIYKTVSAWKRQPVRVLSLFRNIDKVLKSLGFLESGSG | |
| | SGGGTLKYVEDVTNVVRRDVEKWGPFDLVYGSTQPLGSSCDRCPGWYMFQF | |
| | HRILQYALPRQESQRPFFWIFMDNLLLTEDDQETTTRFLQTEAVTLQDVRGRD | |
| | YQNAMRVWSNIPGLKSKHAPLTPKEEEYLQAQVRSRSKLDAPKVDLLVKNCL | |
| | LPLREYFKYFSQNSLPLGGPSSGAPPPSGGSPAGSPTSTEEGTSESATPESGPGTS | |
| | TEPSEGSAPGSPAGSPTSTEEGTSTEPSEGSAPGTSTEPSEGMAPKKKRKVGRV | |
| | PAAMAERPFQCRICMRNFSIKHDLHRHIRTHTGEKPFACDICGRKFARSANLTR | |
| | HTKIHTGSQKPFQCRICMRNFSRSDNLARHIRTHTGEKPFACDICGRKFAQNVS | |
| | RPRHTKIHTGSQKPFQCRICMRNFSRSDDLSKHIRTHTGEKPFACDICGRKFAD | |
| | SSHRTRHTKIHLRQKDAARGSGPKKKRKVNGGGGSRTLVTFKDVFVDFTREE | |
| | WKLLDTAQQIVYRNVMLENYKNLVSLGYQLTKPDVILRLEKGEEPWLV | |
| 1015 | MHDQEFDPPKVYPPVPAEKRKPIRVLSLFDGIATGLLVLKDLGIQVDRYIASEV | 3xFLAG- |
| | CEDSITVGMVRHQGKIMYVGDVRSVTQKHIQEWGPFDLVIGGSPCNDLSIVNP | DNMT3AL- |
| | ARKGLYEGTGRLFFEFYRLLHDARPKEGDDRPFFWLFENVVAMGVSDKRDIS | XTEN80-SV40 |
| | RFLESNPVMIDAKEVSAAHRARYFWGNLPGMNRPLASTVNDKLELQECLEHG | NLS-ZFP-SV40 |
| | RIAKFSKVRTITTRSNSIKQGKDQHFPVFMNEKEDILWCTEMERVFGFPVHYT | NLS-KRAB (AA |
| | DVSNMSRLARQRLLGRSWSVPVIRHLFAPLKEYFACVSSGNSNANSRGPSFSS | sequence) |
| | GLVPLSLRGSHMGPMEIYKTVSAWKRQPVRVLSLFRNIDKVLKSLGFLESGSG | |
| | SGGGTLKYVEDVTNVVRRDVEKWGPFDLVYGSTQPLGSSCDRCPGWYMFQF | |
| | HRILQYALPRQESQRPFFWIFMDNLLLTEDDQETTTRFLQTEAVTLQDVRGRD | |
| | YQNAMRVWSNIPGLKSKHAPLTPKEEEYLQAQVRSRSKLDAPKVDLLVKNCL | |
| | LPLREYFKYFSQNSLPLGGPSSGAPPPSGGSPAGSPTSTEEGTSESATPESGPGTS | |
| | TEPSEGSAPGSPAGSPTSTEEGTSTEPSEGSAPGTSTEPSEGMAPKKKRKVGRV | |
| | PAAMAERPFQCRICMRNFSRSDNLARHIRTHTGEKPFACDICGRKFAQNVSRP | |
| | RHTKIHTGSQKPFQCRICMRNFSRSDDLSKHIRTHTGEKPFACDICGRKFADSS | |
| | HRTRHTKIHTGSQKPFQCRICMRNFSTSSNRKTHIRTHTGEKPFACDICGRKFA | |
| | AQWTRACHTKIHLRQKDAARGSGPKKKRKVNGGGGSRTLVTFKDVFVDFTR | |
| | EEWKLLDTAQQIVYRNVMLENYKNLVSLGYQLTKPDVILRLEKGEEPWLV | |
| 1016 | MHDQEFDPPKVYPPVPAEKRKPIRVLSLFDGIATGLLVLKDLGIQVDRYIASEV | 3xFLAG- |
| | CEDSITVGMVRHQGKIMYVGDVRSVTQKHIQEWGPFDLVIGGSPCNDLSIVNP | DNMT3AL- |
| | ARKGLYEGTGRLFFEFYRLLHDARPKEGDDRPFFWLFENVVAMGVSDKRDIS | XTEN80-SV40 |
| | RFLESNPVMIDAKEVSAAHRARYFWGNLPGMNRPLASTVNDKLELQECLEHG | NLS-ZFP-SV40 |
| | RIAKFSKVRTITTRSNSIKQGKDQHFPVFMNEKEDILWCTEMERVFGFPVHYT | NLS-KRAB (AA |
| | DVSNMSRLARQRLLGRSWSVPVIRHLFAPLKEYFACVSSGNSNANSRGPSFSS | sequence) |
| | GLVPLSLRGSHMGPMEIYKTVSAWKRQPVRVLSLFRNIDKVLKSLGFLESGSG | |
| | SGGGTLKYVEDVTNVVRRDVEKWGPFDLVYGSTQPLGSSCDRCPGWYMFQF | |
| | HRILQYALPRQESQRPFFWIFMDNLLLTEDDQETTTRFLQTEAVTLQDVRGRD | |
| | YQNAMRVWSNIPGLKSKHAPLTPKEEEYLQAQVRSRSKLDAPKVDLLVKNCL | |
| | LPLREYFKYFSQNSLPLGGPSSGAPPPSGGSPAGSPTSTEEGTSESATPESGPGTS | |
| | TEPSEGSAPGSPAGSPTSTEEGTSTEPSEGSAPGTSTEPSEGMAPKKKRKVGRV | |
| | PAAMAERPFQCRICMRNFSRSDDLSKHIRTHTGEKPFACDICGRKFADSSHRTR | |
| | HTKIHTGSQKPFQCRICMRNFSTSSNRKTHIRTHTGEKPFACDICGRKFAAQWT | |
| | RACHTKIHTGSQKPFQCRICMRNFSRKQTRTTHIRTHTGEKPFACDICGRKFAH | |
| | RSSLRRHTKIHLRQKDAARGSGPKKKRKVNGGGGSRTLVTFKDVFVDFTREE | |
| | WKLLDTAQQIVYRNVMLENYKNLVSLGYQLTKPDVILRLEKGEEPWLV | |
| 1017 | MHDQEFDPPKVYPPVPAEKRKPIRVLSLFDGIATGLLVLKDLGIQVDRYIASEV | 3xFLAG- |
| | CEDSITVGMVRHQGKIMYVGDVRSVTQKHIQEWGPFDLVIGGSPCNDLSIVNP | DNMT3AL- |
| | ARKGLYEGTGRLFFEFYRLLHDARPKEGDDRPFFWLFENVVAMGVSDKRDIS | XTEN80-SV40 |
| | RFLESNPVMIDAKEVSAAHRARYFWGNLPGMNRPLASTVNDKLELQECLEHG | NLS-ZFP-SV40 |
| | RIAKFSKVRTITTRSNSIKQGKDQHFPVFMNEKEDILWCTEMERVFGFPVHYT | NLS-KRAB (AA |
| | DVSNMSRLARQRLLGRSWSVPVIRHLFAPLKEYFACVSSGNSNANSRGPSFSS | sequence) |
| | GLVPLSLRGSHMGPMEIYKTVSAWKRQPVRVLSLFRNIDKVLKSLGFLESGSG | |
| | SGGGTLKYVEDVTNVVRRDVEKWGPFDLVYGSTQPLGSSCDRCPGWYMFQF | |
| | HRILQYALPRQESQRPFFWIFMDNLLLTEDDQETTTRFLQTEAVTLQDVRGRD | |
| | YQNAMRVWSNIPGLKSKHAPLTPKEEEYLQAQVRSRSKLDAPKVDLLVKNCL | |
| | LPLREYFKYFSQNSLPLGGPSSGAPPPSGGSPAGSPTSTEEGTSESATPESGPGTS | |
| | TEPSEGSAPGSPAGSPTSTEEGTSTEPSEGSAPGTSTEPSEGMAPKKKRKVGRV | |
| | PAAMAERPFQCRICMRNFSQSAHRKNHIRTHTGEKPFACDICGRKFATSSNRK | |
| | THTKIHTGSQKPFQCRICMRNFSRSDNLSAHIRTHTGEKPFACDICGRKFARNN | |
| | DRKTHTKIHTGSQKPFQCRICMRNFSTSGSLSRHIRTHTGEKPFACDICGRKFA | |
| | QAGHLAKHTKIHLRQKDAARGSGPKKKRKVNGGGGSRTLVTFKDVFVDFTR | |
| | EEWKLLDTAQQIVYRNVMLENYKNLVSLGYQLTKPDVILRLEKGEEPWLV | |
| 1018 | MHDQEFDPPKVYPPVPAEKRKPIRVLSLFDGIATGLLVLKDLGIQVDRYIASEV | 3xFLAG- |
| | CEDSITVGMVRHQGKIMYVGDVRSVTQKHIQEWGPFDLVIGGSPCNDLSIVNP | DNMT3AL- |
| | ARKGLYEGTGRLFFEFYRLLHDARPKEGDDRPFFWLFENVVAMGVSDKRDIS | XTEN80-SV40 |
| | RFLESNPVMIDAKEVSAAHRARYFWGNLPGMNRPLASTVNDKLELQECLEHG | NLS-ZFP-SV40 |
| | RIAKFSKVRTITTRSNSIKQGKDQHFPVFMNEKEDILWCTEMERVFGFPVHYT | NLS-KRAB (AA |
| | DVSNMSRLARQRLLGRSWSVPVIRHLFAPLKEYFACVSSGNSNANSRGPSFSS | sequence) |
| | GLVPLSLRGSHMGPMEIYKTVSAWKRQPVRVLSLFRNIDKVLKSLGFLESGSG | |
| | SGGGTLKYVEDVTNVVRRDVEKWGPFDLVYGSTQPLGSSCDRCPGWYMFQF | |
| | HRILQYALPRQESQRPFFWIFMDNLLLTEDDQETTTRFLQTEAVTLQDVRGRD | |
| | YQNAMRVWSNIPGLKSKHAPLTPKEEEYLQAQVRSRSKLDAPKVDLLVKNCL | |
| | LPLREYFKYFSQNSLPLGGPSSGAPPPSGGSPAGSPTSTEEGTSESATPESGPGTS | |
| | TEPSEGSAPGSPAGSPTSTEEGTSTEPSEGSAPGTSTEPSEGMAPKKKRKVGRV | |
| | PAAMAERPFQCRICMRNFSRSDHLSQHIRTHTGEKPFACDICGRKFAASSTRTK | |
| | HTKIHTGSQKPFQCRICMRNFSRSDDLTRHIRTHTGEKPFACDICGRKFAQKSN | |
| | LSSHTKIHTGSQKPFQCRICMRNFSQSANRTTHIRTHTGEKPFACDICGRKFAQ | |
| | NATRTKHTKIHLRQKDAARGSGPKKKRKVNGGGGSRTLVTFKDVFVDFTREE | |
| | WKLLDTAQQIVYRNVMLENYKNLVSLGYQLTKPDVILRLEKGEEPWLV | |
| 1019 | MHDQEFDPPKVYPPVPAEKRKPIRVLSLFDGIATGLLVLKDLGIQVDRYIASEV | 3xFLAG- |
| | CEDSITVGMVRHQGKIMYVGDVRSVTQKHIQEWGPFDLVIGGSPCNDLSIVNP | DNMT3AL- |
| | ARKGLYEGTGRLFFEFYRLLHDARPKEGDDRPFFWLFENVVAMGVSDKRDIS | XTEN80-SV40 |
| | RFLESNPVMIDAKEVSAAHRARYFWGNLPGMNRPLASTVNDKLELQECLEHG | NLS-ZFP-SV40 |
| | RIAKFSKVRTITTRSNSIKQGKDQHFPVFMNEKEDILWCTEMERVFGFPVHYT | NLS-KRAB (AA |
| | DVSNMSRLARQRLLGRSWSVPVIRHLFAPLKEYFACVSSGNSNANSRGPSFSS | sequence) |
| | GLVPLSLRGSHMGPMEIYKTVSAWKRQPVRVLSLFRNIDKVLKSLGFLESGSG | |
| | SGGGTLKYVEDVTNVVRRDVEKWGPFDLVYGSTQPLGSSCDRCPGWYMFQF | |
| | HRILQYALPRQESQRPFFWIFMDNLLLTEDDQETTTRFLQTEAVTLQDVRGRD | |
| | YQNAMRVWSNIPGLKSKHAPLTPKEEEYLQAQVRSRSKLDAPKVDLLVKNCL | |
| | LPLREYFKYFSQNSLPLGGPSSGAPPPSGGSPAGSPTSTEEGTSESATPESGPGTS | |
| | TEPSEGSAPGSPAGSPTSTEEGTSTEPSEGSAPGTSTEPSEGMAPKKKRKVGRV | |
| | PAAMAERPFQCRICMRNFSRSDTLSEHIRTHTGEKPFACDICGRKFARRWTLV | |
| | GHTKIHTGSQKPFQCRICMRNFSDRSNLSRHIRTHTGEKPFACDICGRKFAQSG | |
| | DLTRHTKIHTGSQKPFQCRICMRNFSQSSDLSRHIRTHTGEKPFACDICGRKFA | |
| | YHWYLKKHTKIHLRQKDAARGSGPKKKRKVNGGGGSRTLVTFKDVFVDFTR | |
| | EEWKLLDTAQQIVYRNVMLENYKNLVSLGYQLTKPDVILRLEKGEEPWLV | |
| 1020 | MHDQEFDPPKVYPPVPAEKRKPIRVLSLFDGIATGLLVLKDLGIQVDRYIASEV | 3xFLAG- |
| | CEDSITVGMVRHQGKIMYVGDVRSVTQKHIQEWGPFDLVIGGSPCNDLSIVNP | DNMT3AL- |
| | ARKGLYEGTGRLFFEFYRLLHDARPKEGDDRPFFWLFENVVAMGVSDKRDIS | XTEN80-SV40 |
| | RFLESNPVMIDAKEVSAAHRARYFWGNLPGMNRPLASTVNDKLELQECLEHG | NLS-ZFP-SV40 |
| | RIAKFSKVRTITTRSNSIKQGKDQHFPVFMNEKEDILWCTEMERVFGFPVHYT | NLS-KRAB (AA |
| | DVSNMSRLARQRLLGRSWSVPVIRHLFAPLKEYFACVSSGNSNANSRGPSFSS | sequence) |
| | GLVPLSLRGSHMGPMEIYKTVSAWKRQPVRVLSLFRNIDKVLKSLGFLESGSG | |
| | SGGGTLKYVEDVTNVVRRDVEKWGPFDLVYGSTQPLGSSCDRCPGWYMFQF | |
| | HRILQYALPRQESQRPFFWIFMDNLLLTEDDQETTTRFLQTEAVTLQDVRGRD | |
| | YQNAMRVWSNIPGLKSKHAPLTPKEEEYLQAQVRSRSKLDAPKVDLLVKNCL | |
| | LPLREYFKYFSQNSLPLGGPSSGAPPPSGGSPAGSPTSTEEGTSESATPESGPGTS | |
| | TEPSEGSAPGSPAGSPTSTEEGTSTEPSEGSAPGTSTEPSEGMAPKKKRKVGRV | |
| | PAAMAERPFQCRICMRNFSRSANLARHIRTHTGEKPFACDICGRKFARSDNLR | |
| | EHTKIHTGSQKPFQCRICMRNFSRPYTLRLHIRTHTGEKPFACDICGRKFAHRS | |
| | NLNKHTKIHTGSQKPFQCRICMRNFSQSGSLTRHIRTHTGEKPFACDICGRKFA | |
| | TSANLSRHTKIHLRQKDAARGSGPKKKRKVNGGGGSRTLVTFKDVFVDFTRE | |
| | EWKLLDTAQQIVYRNVMLENYKNLVSLGYQLTKPDVILRLEKGEEPWLV | |
| 1021 | MHDQEFDPPKVYPPVPAEKRKPIRVLSLFDGIATGLLVLKDLGIQVDRYIASEV | 3xFLAG- |
| | CEDSITVGMVRHQGKIMYVGDVRSVTQKHIQEWGPFDLVIGGSPCNDLSIVNP | DNMT3AL- |
| | ARKGLYEGTGRLFFEFYRLLHDARPKEGDDRPFFWLFENVVAMGVSDKRDIS | XTEN80-SV40 |
| | RFLESNPVMIDAKEVSAAHRARYFWGNLPGMNRPLASTVNDKLELQECLEHG | NLS-ZFP-SV40 |
| | RIAKFSKVRTITTRSNSIKQGKDQHFPVFMNEKEDILWCTEMERVFGFPVHYT | NLS-KRAB (AA |
| | DVSNMSRLARQRLLGRSWSVPVIRHLFAPLKEYFACVSSGNSNANSRGPSFSS | sequence) |
| | GLVPLSLRGSHMGPMEIYKTVSAWKRQPVRVLSLFRNIDKVLKSLGFLESGSG | |
| | SGGGTLKYVEDVTNVVRRDVEKWGPFDLVYGSTQPLGSSCDRCPGWYMFQF | |
| | HRILQYALPRQESQRPFFWIFMDNLLLTEDDQETTTRFLQTEAVTLQDVRGRD | |
| | YQNAMRVWSNIPGLKSKHAPLTPKEEEYLQAQVRSRSKLDAPKVDLLVKNCL | |
| | LPLREYFKYFSQNSLPLGGPSSGAPPPSGGSPAGSPTSTEEGTSESATPESGPGTS | |
| | TEPSEGSAPGSPAGSPTSTEEGTSTEPSEGSAPGTSTEPSEGMAPKKKRKVGRV | |
| | PLEPGEKPYACPECGKSFSRSDDLVRHQRTHTGEKPYKCPECGKSFSTSGSLVR | |
| | HQRTHTGEKPYKCPECGKSFSRSDKLVRHQRTHTGEKPYACPECGKSFSRSDE | |
| | LVRHQRTHTGEKPYKCPECGKSFSTSHSLTEHQRTHTGEKPYKCPECGKSFSR | |
| | ADNLTEHQRTHTGKKTSGSGPKKKRKVNGGGGSRTLVTFKDVFVDFTREEW | |
| | KLLDTAQQIVYRNVMLENYKNLVSLGYQLTKPDVILRLEKGEEPWLV | |
| 1022 | MHDQEFDPPKVYPPVPAEKRKPIRVLSLFDGIATGLLVLKDLGIQVDRYIASEV | 3xFLAG- |
| | CEDSITVGMVRHQGKIMYVGDVRSVTQKHIQEWGPFDLVIGGSPCNDLSIVNP | DNMT3AL- |
| | ARKGLYEGTGRLFFEFYRLLHDARPKEGDDRPFFWLFENVVAMGVSDKRDIS | XTEN80-SV40 |
| | RFLESNPVMIDAKEVSAAHRARYFWGNLPGMNRPLASTVNDKLELQECLEHG | NLS-ZFP-SV40 |
| | RIAKFSKVRTITTRSNSIKQGKDQHFPVFMNEKEDILWCTEMERVFGFPVHYT | NLS-KRAB (AA |
| | DVSNMSRLARQRLLGRSWSVPVIRHLFAPLKEYFACVSSGNSNANSRGPSFSS | sequence) |
| | GLVPLSLRGSHMGPMEIYKTVSAWKRQPVRVLSLFRNIDKVLKSLGFLESGSG | |
| | SGGGTLKYVEDVTNVVRRDVEKWGPFDLVYGSTQPLGSSCDRCPGWYMFQF | |
| | HRILQYALPRQESQRPFFWIFMDNLLLTEDDQETTTRFLQTEAVTLQDVRGRD | |
| | YQNAMRVWSNIPGLKSKHAPLTPKEEEYLQAQVRSRSKLDAPKVDLLVKNCL | |
| | LPLREYFKYFSQNSLPLGGPSSGAPPPSGGSPAGSPTSTEEGTSESATPESGPGTS | |
| | TEPSEGSAPGSPAGSPTSTEEGTSTEPSEGSAPGTSTEPSEGMAPKKKRKVGRV | |
| | PLEPGEKPYACPECGKSFSERSHLREHQRTHTGEKPYKCPECGKSFSTSHSLTE | |
| | HQRTHTGEKPYKCPECGKSFSQAGHLASHQRTHTGEKPYACPECGKSFSTSHS | |
| | LTEHQRTHTGEKPYKCPECGKSFSDPGHLVRHQRTHTGEKPYKCPECGKSFST | |
| | SGNLVRHQRTHTGKKTSGSGPKKKRKVNGGGGSRTLVTFKDVFVDFTREEW | |
| | KLLDTAQQIVYRNVMLENYKNLVSLGYQLTKPDVILRLEKGEEPWLV | |
| 1023 | MHDQEFDPPKVYPPVPAEKRKPIRVLSLFDGIATGLLVLKDLGIQVDRYIASEV | 3xFLAG- |
| | CEDSITVGMVRHQGKIMYVGDVRSVTQKHIQEWGPFDLVIGGSPCNDLSIVNP | DNMT3AL- |
| | ARKGLYEGTGRLFFEFYRLLHDARPKEGDDRPFFWLFENVVAMGVSDKRDIS | XTEN80-SV40 |
| | RFLESNPVMIDAKEVSAAHRARYFWGNLPGMNRPLASTVNDKLELQECLEHG | NLS-ZFP-SV40 |
| | RIAKFSKVRTITTRSNSIKQGKDQHFPVFMNEKEDILWCTEMERVFGFPVHYT | NLS-KRAB (AA |
| | DVSNMSRLARQRLLGRSWSVPVIRHLFAPLKEYFACVSSGNSNANSRGPSFSS | sequence) |
| | GLVPLSLRGSHMGPMEIYKTVSAWKRQPVRVLSLFRNIDKVLKSLGFLESGSG | |
| | SGGGTLKYVEDVTNVVRRDVEKWGPFDLVYGSTQPLGSSCDRCPGWYMFQF | |
| | HRILQYALPRQESQRPFFWIFMDNLLLTEDDQETTTRFLQTEAVTLQDVRGRD | |
| | YQNAMRVWSNIPGLKSKHAPLTPKEEEYLQAQVRSRSKLDAPKVDLLVKNCL | |
| | LPLREYFKYFSQNSLPLGGPSSGAPPPSGGSPAGSPTSTEEGTSESATPESGPGTS | |
| | TEPSEGSAPGSPAGSPTSTEEGTSTEPSEGSAPGTSTEPSEGMAPKKKRKVGRV | |
| | PLEPGEKPYKCPECGKSFSRADNLTEHQRTHTGEKPYKCPECGKSFSTSGSLVR | |
| | HQRTHTGEKPYKCPECGKSFSRKDNLKNHQRTHTGEKPYKCPECGKSFSQSSS | |
| | LVRHQRTHTGEKPYKCPECGKSFSRSDKLVRHQRTHTGEKPYKCPECGKSFSD | |
| | SGNLRVHQRTHTGKKTSGSGPKKKRKVNGGGGSRTLVTFKDVFVDFTREEW | |
| | KLLDTAQQIVYRNVMLENYKNLVSLGYQLTKPDVILRLEKGEEPWLV | |
| 1024 | MHDQEFDPPKVYPPVPAEKRKPIRVLSLFDGIATGLLVLKDLGIQVDRYIASEV | 3xFLAG- |
| | CEDSITVGMVRHQGKIMYVGDVRSVTQKHIQEWGPFDLVIGGSPCNDLSIVNP | DNMT3AL- |
| | ARKGLYEGTGRLFFEFYRLLHDARPKEGDDRPFFWLFENVVAMGVSDKRDIS | XTEN80-SV40 |
| | RFLESNPVMIDAKEVSAAHRARYFWGNLPGMNRPLASTVNDKLELQECLEHG | NLS-ZFP-SV40 |
| | RIAKFSKVRTITTRSNSIKQGKDQHFPVFMNEKEDILWCTEMERVFGFPVHYT | NLS-KRAB (AA |
| | DVSNMSRLARQRLLGRSWSVPVIRHLFAPLKEYFACVSSGNSNANSRGPSFSS | sequence) |
| | GLVPLSLRGSHMGPMEIYKTVSAWKRQPVRVLSLFRNIDKVLKSLGFLESGSG | |
| | SGGGTLKYVEDVTNVVRRDVEKWGPFDLVYGSTQPLGSSCDRCPGWYMFQF | |
| | HRILQYALPRQESQRPFFWIFMDNLLLTEDDQETTTRFLQTEAVTLQDVRGRD | |
| | YQNAMRVWSNIPGLKSKHAPLTPKEEEYLQAQVRSRSKLDAPKVDLLVKNCL | |
| | LPLREYFKYFSQNSLPLGGPSSGAPPPSGGSPAGSPTSTEEGTSESATPESGPGTS | |
| | TEPSEGSAPGSPAGSPTSTEEGTSTEPSEGSAPGTSTEPSEGMAPKKKRKVGRV | |
| | PLEPGEKPYACPECGKSFSQSSSLVRHQRTHTGEKPYKCPECGKSFSQSGDLRR | |
| | HQRTHTGEKPYKCPECGKSFSRSDERKRHQRTHTGEKPYACPECGKSFSHRTT | |
| | LTNHQRTHTGEKPYKCPECGKSFSRSDHLTNHQRTHTGEKPYKCPECGKSFST | |
| | SGELVRHQRTHTGKKTSGSGPKKKRKVNGGGGSRTLVTFKDVFVDFTREEW | |
| | KLLDTAQQIVYRNVMLENYKNLVSLGYQLTKPDVILRLEKGEEPWLV | |
| 1025 | MHDQEFDPPKVYPPVPAEKRKPIRVLSLFDGIATGLLVLKDLGIQVDRYIASEV | 3xFLAG- |
| | CEDSITVGMVRHQGKIMYVGDVRSVTQKHIQEWGPFDLVIGGSPCNDLSIVNP | DNMT3AL- |
| | ARKGLYEGTGRLFFEFYRLLHDARPKEGDDRPFFWLFENVVAMGVSDKRDIS | XTEN80-SV40 |
| | RFLESNPVMIDAKEVSAAHRARYFWGNLPGMNRPLASTVNDKLELQECLEHG | NLS-ZFP-SV40 |
| | RIAKFSKVRTITTRSNSIKQGKDQHFPVFMNEKEDILWCTEMERVFGFPVHYT | NLS-KRAB (AA |
| | DVSNMSRLARQRLLGRSWSVPVIRHLFAPLKEYFACVSSGNSNANSRGPSFSS | sequence) |
| | GLVPLSLRGSHMGPMEIYKTVSAWKRQPVRVLSLFRNIDKVLKSLGFLESGSG | |
| | SGGGTLKYVEDVTNVVRRDVEKWGPFDLVYGSTQPLGSSCDRCPGWYMFQF | |
| | HRILQYALPRQESQRPFFWIFMDNLLLTEDDQETTTRFLQTEAVTLQDVRGRD | |
| | YQNAMRVWSNIPGLKSKHAPLTPKEEEYLQAQVRSRSKLDAPKVDLLVKNCL | |
| | LPLREYFKYFSQNSLPLGGPSSGAPPPSGGSPAGSPTSTEEGTSESATPESGPGTS | |
| | TEPSEGSAPGSPAGSPTSTEEGTSTEPSEGSAPGTSTEPSEGMAPKKKRKVGRV | |
| | PLEPGEKPYACPECGKSFSQSGDLRRHQRTHTGEKPYKCPECGKSFSRSDERK | |
| | RHQRTHTGEKPYKCPECGKSFSHRTTLTNHQRTHTGEKPYACPECGKSFSRSD | |
| | HLTNHQRTHTGEKPYKCPECGKSFSTSGELVRHQRTHTGEKPYKCPECGKSFS | |
| | RSDDLVRHQRTHTGKKTSGSGPKKKRKVNGGGGSRTLVTFKDVFVDFTREE | |
| | WKLLDTAQQIVYRNVMLENYKNLVSLGYQLTKPDVILRLEKGEEPWLV | |
| 1026 | MHDQEFDPPKVYPPVPAEKRKPIRVLSLFDGIATGLLVLKDLGIQVDRYIASEV | 3xFLAG- |
| | CEDSITVGMVRHQGKIMYVGDVRSVTQKHIQEWGPFDLVIGGSPCNDLSIVNP | DNMT3AL- |
| | ARKGLYEGTGRLFFEFYRLLHDARPKEGDDRPFFWLFENVVAMGVSDKRDIS | XTEN80-SV40 |
| | RFLESNPVMIDAKEVSAAHRARYFWGNLPGMNRPLASTVNDKLELQECLEHG | NLS-ZFP-SV40 |
| | RIAKFSKVRTITTRSNSIKQGKDQHFPVFMNEKEDILWCTEMERVFGFPVHYT | NLS-KRAB (AA |
| | DVSNMSRLARQRLLGRSWSVPVIRHLFAPLKEYFACVSSGNSNANSRGPSFSS | sequence) |
| | GLVPLSLRGSHMGPMEIYKTVSAWKRQPVRVLSLFRNIDKVLKSLGFLESGSG | |
| | SGGGTLKYVEDVTNVVRRDVEKWGPFDLVYGSTQPLGSSCDRCPGWYMFQF | |
| | HRILQYALPRQESQRPFFWIFMDNLLLTEDDQETTTRFLQTEAVTLQDVRGRD | |
| | YQNAMRVWSNIPGLKSKHAPLTPKEEEYLQAQVRSRSKLDAPKVDLLVKNCL | |
| | LPLREYFKYFSQNSLPLGGPSSGAPPPSGGSPAGSPTSTEEGTSESATPESGPGTS | |
| | TEPSEGSAPGSPAGSPTSTEEGTSTEPSEGSAPGTSTEPSEGMAPKKKRKVGRV | |
| | PLEPGEKPYACPECGKSFSQRAHLERHQRTHTGEKPYKCPECGKSFSQLAHLR | |
| | AHQRTHTGEKPYKCPECGKSFSDPGHLVRHQRTHTGEKPYACPECGKSFSRRS | |
| | ACRRHQRTHTGEKPYKCPECGKSFSRSDHLTTHQRTHTGEKPYKCPECGKSFS | |
| | QSSSLVRHQRTHTGKKTSGSGPKKKRKVNGGGGSRTLVTFKDVFVDFTREEW | |
| | KLLDTAQQIVYRNVMLENYKNLVSLGYQLTKPDVILRLEKGEEPWLV | |
| 1027 | MHDQEFDPPKVYPPVPAEKRKPIRVLSLFDGIATGLLVLKDLGIQVDRYIASEV | 3xFLAG- |
| | CEDSITVGMVRHQGKIMYVGDVRSVTQKHIQEWGPFDLVIGGSPCNDLSIVNP | DNMT3AL- |
| | ARKGLYEGTGRLFFEFYRLLHDARPKEGDDRPFFWLFENVVAMGVSDKRDIS | XTEN80-SV40 |
| | RFLESNPVMIDAKEVSAAHRARYFWGNLPGMNRPLASTVNDKLELQECLEHG | NLS-ZFP-SV40 |
| | RIAKFSKVRTITTRSNSIKQGKDQHFPVFMNEKEDILWCTEMERVFGFPVHYT | NLS-KRAB (AA |
| | DVSNMSRLARQRLLGRSWSVPVIRHLFAPLKEYFACVSSGNSNANSRGPSFSS | sequence) |
| | GLVPLSLRGSHMGPMEIYKTVSAWKRQPVRVLSLFRNIDKVLKSLGFLESGSG | |
| | SGGGTLKYVEDVTNVVRRDVEKWGPFDLVYGSTQPLGSSCDRCPGWYMFQF | |
| | HRILQYALPRQESQRPFFWIFMDNLLLTEDDQETTTRFLQTEAVTLQDVRGRD | |
| | YQNAMRVWSNIPGLKSKHAPLTPKEEEYLQAQVRSRSKLDAPKVDLLVKNCL | |
| | LPLREYFKYFSQNSLPLGGPSSGAPPPSGGSPAGSPTSTEEGTSESATPESGPGTS | |
| | TEPSEGSAPGSPAGSPTSTEEGTSTEPSEGSAPGTSTEPSEGMAPKKKRKVGRV | |
| | PLEPGEKPYACPECGKSFSQSSNLVRHQRTHTGEKPYKCPECGKSFSRSDDLV | |
| | RHQRTHTGEKPYKCPECGKSFSTHLDLIRHQRTHTGEKPYACPECGKSFSTSG | |
| | NLTEHQRTHTGEKPYKCPECGKSFSRRSACRRHQRTHTGEKPYKCPECGKSFS | |
| | RNDTLTEHQRTHTGKKTSGSGPKKKRKVNGGGGSRTLVTFKDVFVDFTREEW | |
| | KLLDTAQQIVYRNVMLENYKNLVSLGYQLTKPDVILRLEKGEEPWLV | |

[1079] The present invention is not intended to be limited in scope to the particular disclosed embodiments, which are provided, for example, to illustrate various aspects of the invention. Various modifications to the compositions and methods described will become apparent from the description and teachings herein. Such variations may be practiced without departing from the true scope and spirit of the disclosure and are intended to fall within the scope of the present disclosure.

Sequences

| SEQ | | |
|---|---|---|
| ID NO | Sequence | Description |
| 586 | GTTTAAGAGCTATGCTGGAAACAGCATAGCAAGTTTAAATAAGGCTAG | SpCas9 gRNA |
| | TCCGTTATCAACTTGAAAAAGTGGCACCGAGTCGGTGC | scaffold |
| | | sequence (DNA) |
| 587 | GUUUAAGAGCUAUGCUGGAAACAGCAUAGCAAGUUUAAAUAAGGCU | SpCas9 gRNA |
| | AGUCCGUUAUCAACUUGAAAAAGUGGCACCGAGUCGGUGC | scaffold |
| | | sequence (RNA) |
| 588 | NGG | S. pyogenes Cas9 |
| | | protospacer |
| | | adjacent motif |
| 589 | NNGRRT | S. aureus Cas9 |
| | | protospacer |
| | | adjacent motif |
| 590 | RTLVTFKDVFVDFTREEWKLLDTAQQILYRNVMLENYKNLVSLGYQLTKP | KRAB (AA) |
| | DVILRLEKGEEPWLV | |
| 591 | CGGACACTGGTGACCTTCAAGGATGTGTTTGTGGACTTCACCAGGGAGG | KRAB (nt) |
| | AGTGGAAGCTGCTGGACACTGCTCAGCAGATCCTGTACAGAAATGTGA | |
| | TGCTGGAGAACTATAAGAACCTGGTTTCCTTGGGTTATCAGCTTACTAA | |
| | GCCAGATGTGATCCTCCGGTTGGAGAAGGGAGAAGAGCCCTGGCTGGT | |
| | G | |
| 592 | KRPAATKKAGQAKKKK | NLS (AA) |
| 593 | PKKKRKV | NLS-2 (AA) |
| 594 | CCAAAGAAGAAGCGGAAGGTCGGTATCCACGGAGTCCCAGCAGCCGAC | NLS2-dSpCas9- |
| | AAGAAGTACTCCATTGGGCTCGCCATCGGCACAAACAGCGTCGGCTGG | NLS-KRAB-NLS2 |
| | GCCGTCATTACGGACGAGTACAAGGTGCCGAGCAAAAAATTCAAAGTT | (nt) |
| | CTGGGCAATACCGATCGCCACAGCATAAAGAAGAACCTCATTGGCGCC | |
| | CTCCTGTTCGACTCCGGGGAAACCGCCGAAGCCACGCGGCTCAAAAGA | |
| | ACAGCACGGCGCAGATATACCCGCAGAAAGAATCGGATCTGCTACCtgca | |
| | GGAGATCTTTAGTAATGAGATGGCTAAGGTGGATGACTCTTTCTTCCAT | |
| | AGGCTGGAGGAGTCCTTTTTGGTGGAGGAGGATAAAAAGCACGAGCGC | |
| | CACCCAATCTTTGGCAATATCGTGGACGAGGTGGCGTACCATGAAAAGT | |
| | ACCCAACCATATATCATCTGAGGAAGAAGCTTGTAGACAGTACTGATA | |
| | AGGCTGACTTGCGGTTGATCTATCTCGCGCTGGCGCATATGATCAAATT | |
| | TCGGGGACACTTCCTCATCGAGGGGGACCTGAACCCAGACAACAGCGA | |
| | TGTCGACAAACTCTTTATCCAACTGGTTCAGACTTACAATCAGCTTTTCG | |
| | AAGAGAACCCGATCAACGCATCCGGAGTTGACGCCAAAGCAATCCTGA | |
| | GCGCTAGGCTGTCCAAATCCCGGCGGCTCGAAAACCTCATCGCACAGCT | |
| | CCCTGGGGAGAAGAAGAACGGCCTGTTTGGTAATCTTATCGCCCTGTCA | |
| | CTCGGGCTGACCCCCAACTTTAAATCTAACTTCGACCTGGCCGAAGATG | |
| | CCAAGCTTCAACTGAGCAAAGACACCTACGATGATGATCTCGACAATCT | |
| | GCTGGCCCAGATCGGCGACCAGTACGCAGACCTTTTTTTGGCGGCAAAG | |
| | AACCTGTCAGACGCCATTCTGCTGAGTGATATTCTGCGAGTGAACACGG | |
| | AGATCACCAAAGCTCCGCTGAGCGCTAGTATGATCAAGCGCTATGATG | |
| | AGCACCACCAAGACTTGACTTTGCTGAAGGCCCTTGTCAGACAGCAACT | |
| | GCCTGAGAAGTACAAGGAAATTTTCTTCGATCAGTCTAAAAATGGCTAC | |
| | GCCGGATACATTGACGGCGGAGCAAGCCAGGAGGAATTTTACAAATTT | |
| | ATTAAGCCCATCTTGGAAAAAATGGACGGCACCGAGGAGCTGCTGGTA | |
| | AAGCTTAACAGAGAAGATCTGTTGCGCAAACAGCGCACTTTCGACAAT | |
| | GGAAGCATCCCCCACCAGATTCACCTGGGCGAACTGCACGCTATCCTCA | |
| | GGCGGCAAGAGGATTTCTACCCCTTTTTGAAAGATAACAGGGAAAAGA | |
| | TTGAGAAAATCCTCACATTTCGGATACCCTACTATGTAGGCCCCCTCGC | |
| | CCGGGGAAATTCCAGATTCGCGTGGATGACTCGCAAATCAGAAGAGAC | |
| | CATCACTCCCTGGAACTTCGAGGAAGTCGTGGATAAGGGGGCCTCTGCC | |
| | CAGTCCTTCATCGAAAGGATGACTAACTTTGATAAAAATCTGCCTAACG | |
| | AAAAGGTGCTTCCTAAACACTCTCTGCTGTACGAGTACTTCACAGTTTA | |
| | TAACGAGCTCACCAAGGTCAAATACGTCACAGAAGGGATGAGAAAGCC | |
| | AGCATTCCTGTCTGGAGAGCAGAAGAAAGCTATCGTGGACCTCCTCTTC | |
| | AAGACGAACCGGAAAGTTACCGTGAAACAGCTCAAAGAAGACTATTTC | |
| | AAAAAGATTGAATGTTTCGACTCTGTTGAAATCAGCGGAGTGGAGGAT | |
| | CGCTTCAACGCATCCCTGGGAACGTATCACGATCTCCTGAAAATCATTA | |
| | AAGACAAGGACTTCCTGGACAATGAGGAGAACGAGGACATTCTTGAGG | |
| | ACATTGTCCTCACCCTTACGTTGTTTGAAGATAGGGAGATGATTGAAGA | |
| | ACGCTTGAAAACTTACGCTCATCTCTTCGACGACAAAGTCATGAAACAG | |
| | CTCAAGAGGCGCCGATATACAGGATGGGGGCGGCTGTCAAGAAAACTG | |
| | ATCAATGGgatcCGAGACAAGCAGAGTGGAAAGACAATCCTGGATTTTCT | |
| | TAAGTCCGATGGATTTGCCAACCGGAACTTCATGCAGTTGATCCATGAT | |
| | GACTCTCTCACCTTTAAGGAGGACATCCAGAAAGCACAAGTTTCTGGCC | |
| | AGGGGGACAGTCTTCACGAGCACATCGCTAATCTTGCAGGTAGCCCAG | |
| | CTATCAAAAAGGGAATACTGCAGACCGTTAAGGTCGTGGATGAACTCG | |
| | TCAAAGTAATGGGAAGGCATAAGCCCGAGAATATCGTTATCGAGATGG | |
| | CCCGAGAGAACCAAACTACCCAGAAGGGACAGAAGAACAGTAGGGAA | |
| | AGGATGAAGAGGATTGAAGAGGGTATAAAAGAACTGGGGTCCCAAATC | |
| | CTTAAGGAACACCCAGTTGAAAACACCCAGCTTCAGAATGAGAAGCTC | |
| | TACCTGTACTACCTGCAGAACGGCAGGGACATGTACGTGGATCAGGAA | |
| | CTGGACATCAATCGGCTCTCCGACTACGACGTGGATGCCATCGTGCCCC | |
| | AGTCTTTTCTCAAAGATGATTCTATTGATAATAAAGTGTTGACAAGATC | |
| | CGATAAAAATAGAGGGAAGAGTGATAACGTCCCCTCAGAAGAAGTTGT | |
| | CAAGAAAATGAAAAATTATTGGCGGCAGCTGCTGAACGCCAAACTGAT | |
| | CACACAACGGAAGTTCGATAATCTGACTAAGGCTGAACGAGGTGGCCT | |
| | GTCTGAGTTGGATAAAGCCGGCTTCATCAAAAGGCAGCTTGTTGAGACA | |
| | CGCCAGATCACCAAgcacGTGGCCCAAATTCTCGATTCACGCATGAACAC | |
| | CAAGTACGATGAAAATGACAAACTGATTCGAGAGGTGAAAGTTATTAC | |
| | TCTGAAGTCTAAGCTGGTCTCAGATTTCAGAAAGGACTTTCAGTTTTAT | |
| | AAGGTGAGAGAGATCAACAATTACCACCATGCGCATGATGCCTACCTG | |
| | AATGCAGTGGTAGGCACTGCACTTATCAAAAAATATCCCAAGCTTGAAT | |
| | CTGAATTTGTTTACGGAGACTATAAAGTGTACGATGTTAGGAAAATGAT | |
| | CGCAAAGTCTGAGCAGGAAATAGGCAAGGCCACCGCTAAGTACTTCTT | |
| | TTACAGCAATATTATGAATTTTTTCAAGACCGAGATTACACTGGCCAAT | |
| | GGAGAGATTCGGAAGCGACCACTTATCGAAACAAACGGAGAAACAGG | |
| | AGAAATCGTGTGGGACAAGGGTAGGGATTTCGCGACAGTCCGGAAGGT | |
| | CCTGTCCATGCCGCAGGTGAACATCGTTAAAAAGACCGAAGTACAGAC | |
| | CGGAGGCTTCTCCAAGGAAAGTATCCTCCCGAAAAGGAACAGCGACAA | |
| | GCTGATCGCACGCAAAAAAGATTGGGACCCCAAGAAATACGGCGGATT | |
| | CGATTCTCCTACAGTCGCTTACAGTGTACTGGTTGTGGCCAAAGTGGAG | |
| | AAAGGGAAGTCTAAAAAACTCAAAAGCGTCAAGGAACTGCTGGGCATC | |
| | ACAATCATGGAGCGATCAAGCTTCGAAAAAAACCCCATCGACTTTCTCG | |
| | AGGCGAAAGGATATAAAGAGGTCAAAAAAGACCTCATCATTAAGCTTC | |
| | CCAAGTACTCTCTCTTTGAGCTTGAAAACGGCCGGAAACGAATGCTCGC | |
| | TAGTGCGGGCGAGCTGCAGAAAGGTAACGAGCTGGCACTGCCCTCTAA | |
| | ATACGTTAATTTCTTGTATCTGGCCAGCCACTATGAAAAGCTCAAAGGG | |
| | TCTCCCGAAGATAATGAGCAGAAGCAGCTGTTCGTGGAACAACACAAA | |
| | CACTACCTTGATGAGATCATCGAGCAAATAAGCGAATTCTCCAAAAGA | |
| | GTGATCCTCGCCGACGCTAACCTCGATAAGGTGCTTTCTGCTTACAATA | |
| | AGCACAGGGATAAGCCCATCAGGGAGCAGGCAGAAAACATTATCCACT | |
| | TGTTTACTCTGACCAACTTGGGCGCGCCTGCAGCCTTCAAGTACTTCGA | |
| | CACCACCATAGACAGAAAGCGGTACACCTCTACAAAGGAGGTCCTGGA | |
| | CGCCACACTGATTCATCAGTCAATTACGGGGCTCTATGAAACAAGAATC | |
| | GACCTCTCTCAGCTCGGTGGAGACAAAAGGCCGGCGGCCACGAAAAAG | |
| | GCCGGCCAGGCAAAAAAGAAAAAGGctagCgatgctaagtcactgactgcctggtcccgga | |
| | cactggtgaccttcaaggatgtgtttgtggacttcaccagggaggagtggaagctgctggacactgct | |
| | cagcagatcctgtacagaaatgtgatgctggagaactataagaacctggtttccttgggttatcagct | |
| | tactaagccagatgtgatcctccggttggagaagggagaagagccctggctggtggagagagaaattc | |
| | accaagagacccatcctgattcagagactgcatttgaaatcaaatcatcagttCCGAAAAAGAAACGC | |
| | AAAGTT | |
| 595 | PKKKRKVGIHGVPAADKKYSIGLAIGTNSVGWAVITDEYKVPSKKFKVLG | NLS2-dSpCas9- |
| | NTDRHSIKKNLIGALLFDSGETAEATRLKRTARRRYTRRKNRICYLQEIFSN | NLS-KRAB-NLS2 |
| | EMAKVDDSFFHRLEESFLVEEDKKHERHPIFGNIVDEVAYHEKYPTIYHLR | (AA) |
| | KKLVDSTDKADLRLIYLALAHMIKFRGHFLIEGDLNPDNSDVDKLFIQLVQ | |
| | TYNQLFEENPINASGVDAKAILSARLSKSRRLENLIAQLPGEKKNGLFGNLI | |
| | ALSLGLTPNFKSNFDLAEDAKLQLSKDTYDDDLDNLLAQIGDQYADLFLA | |
| | AKNLSDAILLSDILRVNTEITKAPLSASMIKRYDEHHQDLTLLKALVRQQLP | |
| | EKYKEIFFDQSKNGYAGYIDGGASQEEFYKFIKPILEKMDGTEELLVKLNRE | |
| | DLLRKQRTFDNGSIPHQIHLGELHAILRRQEDFYPFLKDNREKIEKILTFRIPY | |
| | YVGPLARGNSRFAWMTRKSEETITPWNFEEVVDKGASAQSFIERMTNFDK | |
| | NLPNEKVLPKHSLLYEYFTVYNELTKVKYVTEGMRKPAFLSGEQKKAIVD | |
| | LLFKTNRKVTVKQLKEDYFKKIECFDSVEISGVEDRFNASLGTYHDLLKIIK | |
| | DKDFLDNEENEDILEDIVLTLTLFEDREMIEERLKTYAHLFDDKVMKQLKR | |
| | RRYTGWGRLSRKLINGIRDKQSGKTILDFLKSDGFANRNFMQLIHDDSLTF | |
| | KEDIQKAQVSGQGDSLHEHIANLAGSPAIKKGILQTVKVVDELVKVMGRH | |
| | KPENIVIEMARENQTTQKGQKNSRERMKRIEEGIKELGSQILKEHPVENTQL | |
| | QNEKLYLYYLQNGRDMYVDQELDINRLSDYDVDAIVPQSFLKDDSIDNKV | |
| | LTRSDKNRGKSDNVPSEEVVKKMKNYWRQLLNAKLITQRKFDNLTKAER | |
| | GGLSELDKAGFIKRQLVETRQITKHVAQILDSRMNTKYDENDKLIREVKVI | |
| | TLKSKLVSDFRKDFQFYKVREINNYHHAHDAYLNAVVGTALIKKYPKLES | |
| | EFVYGDYKVYDVRKMIAKSEQEIGKATAKYFFYSNIMNFFKTEITLANGEI | |
| | RKRPLIETNGETGEIVWDKGRDFATVRKVLSMPQVNIVKKTEVQTGGFSKE | |
| | SILPKRNSDKLIARKKDWDPKKYGGFDSPTVAYSVLVVAKVEKGKSKKLK | |
| | SVKELLGITIMERSSFEKNPIDFLEAKGYKEVKKDLIIKLPKYSLFELENGRK | |
| | RMLASAGELQKGNELALPSKYVNFLYLASHYEKLKGSPEDNEQKQLFVEQ | |
| | HKHYLDEIIEQISEFSKRVILADANLDKVLSAYNKHRDKPIREQAENIIHLFT | |
| | LTNLGAPAAFKYFDTTIDRKRYTSTKEVLDATLIHQSITGLYETRIDLSQLG | |
| | GDKRPAATKKAGQAKKKKASDAKSLTAWSRTLVTFKDVFVDFTREEWKL | |
| | LDTAQQILYRNVMLENYKNLVSLGYQLTKPDVILRLEKGEEPWLVEREIHQ | |
| | ETHPDSETAFEIKSSVPKKKRKV | |
| 596 | MKRNYILGLDIGITSVGYGIIDYETRDVIDAGVRLFKEANVENNEGRRSKRG | SaCas9 (AA) |
| | ARRLKRRRRHRIQRVKKLLFDYNLLTDHSELSGINPYEARVKGLSQKLSEE | dSaCas9 (AA) |
| | EFSAALLHLAKRRGVHNVNEVEEDTGNELSTKEQISRNSKALEEKYVAELQ | |
| | LERLKKDGEVRGSINRFKTSDYVKEAKQLLKVQKAYHQLDQSFIDTYIDLL | |
| | ETRRTYYEGPGEGSPFGWKDIKEWYEMLMGHCTYFPEELRSVKYAYNAD | |
| | LYNALNDLNNLVITRDENEKLEYYEKFQIIENVFKQKKKPTLKQIAKEILVN | |
| | EEDIKGYRVTSTGKPEFTNLKVYHDIKDITARKEIIENAELLDQIAKILTIYQS | |
| | SEDIQEELTNLNSELTQEEIEQISNLKGYTGTHNLSLKAINLILDELWHTNDN | |
| | QIAIFNRLKLVPKKVDLSQQKEIPTTLVDDFILSPVVKRSFIQSIKVINAIIKKY | |
| | GLPNDIIIELAREKNSKDAQKMINEMQKRNRQTNERIEEIIRTTGKENAKYLI | |
| | EKIKLHDMQEGKCLYSLEAIPLEDLLNNPFNYEVDHIIPRSVSFDNSFNNKV | |
| | LVKQEENSKKGNRTPFQYLSSSDSKISYETFKKHILNLAKGKGRISKTKKEY | |
| | LLEERDINRFSVQKDFINRNLVDTRYATRGLMNLLRSYFRVNNLDVKVKSI | |
| | NGGFTSFLRRKWKFKKERNKGYKHHAEDALIIANADFIFKEWKKLDKAKK | |
| | VMENQMFEEKQAESMPEIETEQEYKEIFITPHQIKHIKDFKDYKYSHRVDK | |
| | KPNRELINDTLYSTRKDDKGNTLIVNNLNGLYDKDNDKLKKLINKSPEKLL | |
| | MYHHDPQTYQKLKLIMEQYGDEKNPLYKYYEETGNYLTKYSKKDNGPVI | |
| | KKIKYYGNKLNAHLDITDDYPNSRNKVVKLSLKPYRFDVYLDNGVYKFVT | |
| | VKNLDVIKKENYYEVNSKCYEEAKKLKKISNQAEFIASFYNNDLIKINGEL | |
| | YRVIGVNNDLLNRIEVNMIDITYREYLENMNDKRPPRIIKTIASKTQSIKKYS | |
| | TDILGNLYEVKSKKHPQIIKKG | |
| 597 | KRNYILGLAIGITSVGYGIIDYETRDVIDAGVRLFKEANVENNEGRRSKRGA | |
| | RRLKRRRRHRIQRVKKLLFDYNLLTDHSELSGINPYEARVKGLSQKLSEEEF | |
| | SAALLHLAKRRGVHNVNEVEEDTGNELSTKEQISRNSKALEEKYVAELQL | |
| | ERLKKDGEVRGSINRFKTSDYVKEAKQLLKVQKAYHQLDQSFIDTYIDLLE | |
| | TRRTYYEGPGEGSPFGWKDIKEWYEMLMGHCTYFPEELRSVKYAYNADL | |
| | YNALNDLNNLVITRDENEKLEYYEKFQIIENVFKQKKKPTLKQIAKEILVNE | |
| | EDIKGYRVTSTGKPEFTNLKVYHDIKDITARKEIIENAELLDQIAKILTIYQSS | |
| | EDIQEELTNLNSELTQEEIEQISNLKGYTGTHNLSLKAINLILDELWHTNDN | |
| | QIAIFNRLKLVPKKVDLSQQKEIPTTLVDDFILSPVVKRSFIQSIKVINAIIKKY | |
| | GLPNDIIIELAREKNSKDAQKMINEMQKRNRQTNERIEEIIRTTGKENAKYLI | |
| | EKIKLHDMQEGKCLYSLEAIPLEDLLNNPFNYEVDHIIPRSVSFDNSFNNKV | |
| | LVKQEEASKKGNRTPFQYLSSSDSKISYETFKKHILNLAKGKGRISKTKKEY | |
| | LLEERDINRFSVQKDFINRNLVDTRYATRGLMNLLRSYFRVNNLDVKVKSI | |
| | NGGFTSFLRRKWKFKKERNKGYKHHAEDALIIANADFIFKEWKKLDKAKK | |
| | VMENQMFEEKQAESMPEIETEQEYKEIFITPHQIKHIKDFKDYKYSHRVDK | |
| | KPNRELINDTLYSTRKDDKGNTLIVNNLNGLYDKDNDKLKKLINKSPEKLL | |
| | MYHHDPQTYQKLKLIMEQYGDEKNPLYKYYEETGNYLTKYSKKDNGPVI | |
| | KKIKYYGNKLNAHLDITDDYPNSRNKVVKLSLKPYRFDVYLDNGVYKFVT | |
| | VKNLDVIKKENYYEVNSKCYEEAKKLKKISNQAEFIASFYNNDLIKINGEL | |
| | YRVIGVNNDLLNRIEVNMIDITYREYLENMNDKRPPRIIKTIASKTQSIKKYS | |
| | TDILGNLYEVKSKKHPQIIKKG | |
| 598 | MDKKYSIGLDIGTNSVGWAVITDEYKVPSKKFKVLGNTDRHSIKKNLIGAL | SpCas9 (AA) |
| | LFDSGETAEATRLKRTARRRYTRRKNRICYLQEIFSNEMAKVDDSFFHRLE | |
| | ESFLVEEDKKHERHPIFGNIVDEVAYHEKYPTIYHLRKKLVDSTDKADLRLI | |
| | YLALAHMIKFRGHFLIEGDLNPDNSDVDKLFIQLVQTYNQLFEENPINASGV | |
| | DAKAILSARLSKSRRLENLIAQLPGEKKNGLFGNLIALSLGLTPNFKSNFDL | |
| | AEDAKLQLSKDTYDDDLDNLLAQIGDQYADLFLAAKNLSDAILLSDILRVN | |
| | TEITKAPLSASMIKRYDEHHQDLTLLKALVRQQLPEKYKEIFFDQSKNGYA | |
| | GYIDGGASQEEFYKFIKPILEKMDGTEELLVKLNREDLLRKQRTFDNGSIPH | |
| | QIHLGELHAILRRQEDFYPFLKDNREKIEKILTFRIPYYVGPLARGNSRFAW | |
| | MTRKSEETITPWNFEEVVDKGASAQSFIERMTNFDKNLPNEKVLPKHSLLY | |
| | EYFTVYNELTKVKYVTEGMRKPAFLSGEQKKAIVDLLFKTNRKVTVKQLK | |
| | EDYFKKIECFDSVEISGVEDRFNASLGTYHDLLKIIKDKDFLDNEENEDILED | |
| | IVLTLTLFEDREMIEERLKTYAHLFDDKVMKQLKRRRYTGWGRLSRKLING | |
| | IRDKQSGKTILDFLKSDGFANRNFMQLIHDDSLTFKEDIQKAQVSGQGDSL | |
| | HEHIANLAGSPAIKKGILQTVKVVDELVKVMGRHKPENIVIEMARENQTTQ | |
| | KGQKNSRERMKRIEEGIKELGSQILKEHPVENTQLQNEKLYLYYLQNGRD | |
| | MYVDQELDINRLSDYDVDHIVPQSFLKDDSIDNKVLTRSDKNRGKSDNVPS | |
| | EEVVKKMKNYWRQLLNAKLITQRKFDNLTKAERGGLSELDKAGFIKRQLV | |
| | ETRQITKHVAQILDSRMNTKYDENDKLIREVKVITLKSKLVSDFRKDFQFY | |
| | KVREINNYHHAHDAYLNAVVGTALIKKYPKLESEFVYGDYKVYDVRKMI | |
| | AKSEQEIGKATAKYFFYSNIMNFFKTEITLANGEIRKRPLIETNGETGEIVWD | |
| | KGRDFATVRKVLSMPQVNIVKKTEVQTGGFSKESILPKRNSDKLIARKKD | |
| | WDPKKYGGFDSPTVAYSVLVVAKVEKGKSKKLKSVKELLGITIMERSSFE | |
| | KNPIDFLEAKGYKEVKKDLIIKLPKYSLFELENGRKRMLASAGELQKGNEL | |
| | ALPSKYVNFLYLASHYEKLKGSPEDNEQKQLFVEQHKHYLDEIIEQISEFSK | |
| | RVILADANLDKVLSAYNKHRDKPIREQAENIIHLFTLTNLGAPAAFKYFDTT | |
| | IDRKRYTSTKEVLDATLIHQSITGLYETRIDLSQLGGD | |
| 599 | DKKYSIGLAIGTNSVGWAVITDEYKVPSKKFKVLGNTDRHSIKKNLIGALL | dSpCas9 (AA) |
| | FDSGETAEATRLKRTARRRYTRRKNRICYLQEIFSNEMAKVDDSFFHRLEE | |
| | SFLVEEDKKHERHPIFGNIVDEVAYHEKYPTIYHLRKKLVDSTDKADLRLIY | |
| | LALAHMIKFRGHFLIEGDLNPDNSDVDKLFIQLVQTYNQLFEENPINASGVD | |
| | AKAILSARLSKSRRLENLIAQLPGEKKNGLFGNLIALSLGLTPNFKSNFDLA | |
| | EDAKLQLSKDTYDDDLDNLLAQIGDQYADLFLAAKNLSDAILLSDILRVNT | |
| | EITKAPLSASMIKRYDEHHQDLTLLKALVRQQLPEKYKEIFFDQSKNGYAG | |
| | YIDGGASQEEFYKFIKPILEKMDGTEELLVKLNREDLLRKQRTFDNGSIPHQ | |
| | IHLGELHAILRRQEDFYPFLKDNREKIEKILTFRIPYYVGPLARGNSRFAWM | |
| | TRKSEETITPWNFEEVVDKGASAQSFIERMTNFDKNLPNEKVLPKHSLLYE | |
| | YFTVYNELTKVKYVTEGMRKPAFLSGEQKKAIVDLLFKTNRKVTVKQLKE | |
| | DYFKKIECFDSVEISGVEDRFNASLGTYHDLLKIIKDKDFLDNEENEDILEDI | |
| | VLTLTLFEDREMIEERLKTYAHLFDDKVMKQLKRRRYTGWGRLSRKLINGI | |
| | RDKQSGKTILDFLKSDGFANRNFMQLIHDDSLTFKEDIQKAQVSGQGDSLH | |
| | EHIANLAGSPAIKKGILQTVKVVDELVKVMGRHKPENIVIEMARENQTTQK | |
| | GQKNSRERMKRIEEGIKELGSQILKEHPVENTQLQNEKLYLYYLQNGRDM | |
| | YVDQELDINRLSDYDVDAIVPQSFLKDDSIDNKVLTRSDKNRGKSDNVPSE | |
| | EVVKKMKNYWRQLLNAKLITQRKFDNLTKAERGGLSELDKAGFIKRQLVE | |
| | TRQITKHVAQILDSRMNTKYDENDKLIREVKVITLKSKLVSDFRKDFQFYK | |
| | VREINNYHHAHDAYLNAVVGTALIKKYPKLESEFVYGDYKVYDVRKMIA | |
| | KSEQEIGKATAKYFFYSNIMNFFKTEITLANGEIRKRPLIETNGETGEIVWDK | |
| | GRDFATVRKVLSMPQVNIVKKTEVQTGGFSKESILPKRNSDKLIARKKDW | |
| | DPKKYGGFDSPTVAYSVLVVAKVEKGKSKKLKSVKELLGITIMERSSFEKN | |
| | PIDFLEAKGYKEVKKDLIIKLPKYSLFELENGRKRMLASAGELQKGNELAL | |
| | PSKYVNFLYLASHYEKLKGSPEDNEQKQLFVEQHKHYLDEIIEQISEFSKRV | |
| | ILADANLDKVLSAYNKHRDKPIREQAENIIHLFTLTNLGAPAAFKYFDTTID | |
| | RKRYTSTKEVLDATLIHQSITGLYETRIDLSQLGGD | |
| 600 | MKTPADTGFAFPDWAYKPESSPGSRQIQLWHFILELLRKEEYQGVIAWQG | ERF domain (AA) |
| | DYGEFVIKDPDEVARLWGVRKCKPQMNYDKLSRALRYYYNKRILHKTKG | |
| | KRFTYKFNFNKLVLVNYPFIDVGLAGGAVPQSAPPVPSGGSHFRFPPSTPSE | |
| | VLSPTEDPRSPPACSSSSSSLFSAVVARRLGRGSVSDCSDGTSELEEPLGEDP | |
| | RARPPGPPDLGAFRGPPLARLPHDPGVFRVYPRPRGGPEPLSPFPVSPLAGP | |
| | GSLLPPQLSPALPMTPTHLAYTPSPTLSPMYPSGGGGPSGSGGGSHFSFSPED | |
| | MKRYLQAHTQSVYNYHLSPRAFLHYPGLVVPQPQRPDKCPLPPMAPETPP | |
| | VPSSASSSSSSSSSPFKFKLQPPPLGRRQRAAGEKAVAGADKSGGSAGGLAE | |
| | GAGALAPPPPPPQIKVEPISEGESEEVEVTDISDEDEEDGEVFKTPRAPPAPP | |
| | KPEPGEAPGASQCMPLKLRFKRRWSEDCRLEGGGGPAGGFEDEGEDKKVR | |
| | GEGPGEAGGPLTPRRVSSDLQHATAQLSLEHRDS | |
| 601 | MERVKMINVQRLLEAAEFLERRERECEHGYASSFPSMPSPRLQHSKPPRRL | MXI1 domain |
| | SRAQKHSSGSSNTSTANRSTHNELEKNRRAHLRLCLERLKVLIPLGPDCTR | (AA) |
| | HTTLGLLNKAKAHIKKLEEAERKSQHQLENLEREQRFLKWRLEQLQGPQE | |
| | MERIRMDSIGSTISSDRSDSEREEIEVDVESTEFSHGEVDNISTTSISDIDDHSS | |
| | LPSIGSDEGYSSASVKLSFTS | |
| 602 | ASPKKKRKVEASGSGMNIQMLLEAADYLERREREAEHGYASMLPGSGMNI | SID4X domain |
| | QMLLEAADYLERREREAEHGYASMLPGSGMNIQMLLEAADYLERREREA | (AA) |
| | EHGYASMLPGSGMNIQMLLEAADYLERREREAEHGYASMLPSRSR | |
| 603 | MAAAVRMNIQMLLEAADYLERREREAEHGYASMLPYNNKDRDALKRRN | MAD-SID domain |
| | KSKKNNSSSRST | (AA) |
| | HNEMEKNRRAHLRLCLEKLKGLVPLGPESSRHTTLSLLTKAKLHIKKLEDC | |
| | DRKAVHQID | |
| | QLQREQRHLKRQLEKLGIERIRMDSIGSTVSSERSDSDREEIDVDVESTDYL | |
| | TGDLDWSS | |
| | SSVSDSDERGSMQSLGSDEGYSSTSIKRIKLQDSHKACLG | |
| 604 | MPAMPSSGPGDTSSSAAEREEDRKDGEEQEEPRGKEERQEPSTTARKVGRP | DNMT3A (AA) |
| | GRKRKHPPVESGDTPKDPAVISKSPSMAQDSGASELLPNGDLEKRSEPQPEE | |
| | GSPAGGQKGGAPAEGEGAAETLPEASRAVENGCCTPKEGRGAPAEAGKEQ | |
| | KETNIESMKMEGSRGRLRGGLGWESSLRQRPMPRLTFQAGDPYYISKRKR | |
| | DEWLARWKREAEKKAKVIAGMNAVEENQGPGESQKVEEASPPAVQQPTD | |
| | PASPTVATTPEPVGSDAGDKNATKAGDDEPEYEDGRGFGIGELVWGKLRG | |
| | FSWWPGRIVSWWMTGRSRAAEGTRWVMWFGDGKFSVVCVEKLMPLSSF | |
| | CSAFHQATYNKQPMYRKAIYEVLQVASSRAGKLFPVCHDSDESDTAKAVE | |
| | VQNKPMIEWALGGFQPSGPKGLEPPEEEKNPYKEVYTDMWVEPEAAAYA | |
| | PPPPAKKPRKSTAEKPKVKEIIDERTRERLVYEVRQKCRNIEDICISCGSLNV | |
| | TLEHPLFVGGMCQNCKNCFLECAYQYDDDGYQSYCTICCGGREVLMCGN | |
| | NNCCRCFCVECVDLLVGPGAAQAAIKEDPWNCYMCGHKGTYGLLRRRED | |
| | WPSRLQMFFANNHDQEFDPPKVYPPVPAEKRKPIRVLSLFDGIATGLLVLK | |
| | DLGIQVDRYIASEVCEDSITVGMVRHQGKIMYVGDVRSVTQKHIQEWGPF | |
| | DLVIGGSPCNDLSIVNPARKGLYEGTGRLFFEFYRLLHDARPKEGDDRPFF | |
| | WLFENVVAMGVSDKRDISRFLESNPVMIDAKEVSAAHRARYFWGNLPGM | |
| | NRPLASTVNDKLELQECLEHGRIAKFSKVRTITTRSNSIKQGKDQHFPVFMN | |
| | EKEDILWCTEMERVFGFPVHYTDVSNMSRLARQRLLGRSWSVPVIRHLFAP | |
| | LKEYFA | |
| 605 | MKGDTRHLNGEEDAGGREDSILVNGACSDQSSDSPPILEAIRTPEIRGRRSSS | DNMT3B (AA) |
| | RLSKREVSSLLSYTQDLTGDGDGEDGDGSDTPVMPKLFRETRTRSESPAVR | |
| | TRNNNSVSSRERHRPSPRSTRGRQGRNHVDESPVEFPATRSLRRRATASAG | |
| | TPWPSPPSSYLTIDLTDDTEDTHGTPQSSSTPYARLAQDSQQGGMESPQVEA | |
| | DSGDGDSSEYQDGKEFGIGDLVWGKIKGFSWWPAMVVSWKATSKRQAM | |
| | SGMRWVQWFGDGKFSEVSADKLVALGLFSQHFNLATFNKLVSYRKAMY | |
| | HALEKARVRAGKTFPSSPGDSLEDQLKPMLEWAHGGFKPTGIEGLKPNNT | |
| | QPVVNKSKVRRAGSRKLESRKYENKTRRRTADDSATSDYCPAPKRLKTNC | |
| | YNNGKDRGDEDQSREQMASDVANNKSSLEDGCLSCGRKNPVSFHPLFEGG | |
| | LCQTCRDRFLELFYMYDDDGYQSYCTVCCEGRELLLCSNTSCCRCFCVEC | |
| | LEVLVGTGTAAEAKLQEPWSCYMCLPQRCHGVLRRRKDWNVRLQAFFTS | |
| | DTGLEYEAPKLYPAIPAARRRPIRVLSLFDGIATGYLVLKELGIKVGKYVAS | |
| | EVCEESIAVGTVKHEGNIKYVNDVRNITKKNIEEWGPFDLVIGGSPCNDLSN | |
| | VNPARKGLYEGTGRLFFEFYHLLNYSRPKEGDDRPFFWMFENVVAMKVG | |
| | DKRDISRFLECNPVMIDAIKVSAAHRARYFWGNLPGMNRPVIASKNDKLEL | |
| | QDCLEYNRIAKLKKVQTITTKSNSIKQGKNQLFPVVMNGKEDVLWCTELE | |
| | RIFGFPVHYTDVSNMGRGARQKLLGRSWSVPVIRHLFAPLKDYFACE | |
| 606 | MLSGKKAAAAAAAAAAAATGTEAGPGTAGGSENGSEVAAQPAGLSGPAE | LSD1 (AA) |
| | VGPGAVGERTPRKKEPPRASPPGGLAEPPGSAGPQAGPTVVPGSATPMETG | |
| | IAETPEGRRTSRRKRAKVEYREMDESLANLSEDEYYSEEERNAKAEKEKKL | |
| | PPPPPQAPPEEENESEPEEPSGVEGAAFQSRLPHDRMTSQEAACFPDIISGPQ | |
| | QTQKVFLFIRNRTLQLWLDNPKIQLTFEATLQQLEAPYNSDTVLVHRVHSY | |
| | LERHGLINFGIYKRIKPLPTKKTGKVIIIGSGVSGLAAARQLQSFGMDVTLLE | |
| | ARDRVGGRVATFRKGNYVADLGAMVVTGLGGNPMAVVSKQVNMELAKI | |
| | KQKCPLYEANGQAVPKEKDEMVEQEFNRLLEATSYLSHQLDFNVLNNKPV | |
| | SLGQALEVVIQLQEKHVKDEQIEHWKKIVKTQEELKELLNKMVNLKEKIK | |
| | ELHQQYKEASEVKPPRDITAEFLVKSKHRDLTALCKEYDELAETQGKLEEK | |
| | LQELEANPPSDVYLSSRDRQILDWHFANLEFANATPLSTLSLKHWDQDDDF | |
| | EFTGSHLTVRNGYSCVPVALAEGLDIKLNTAVRQVRYTASGCEVIAVNTRS | |
| | TSQTFIYKCDAVLCTLPLGVLKQQPPAVQFVPPLPEWKTSAVQRMGFGNL | |
| | NKVVLCFDRVFWDPSVNLFGHVGSTTASRGELFLFWNLYKAPILLALVAG | |
| | EAAGIMENISDDVIVGRCLAILKGIFGSSAVPQPKETVVSRWRADPWARGS | |
| | YSYVAAGSSGNDYDLMAQPITPGPSIPGAPQPIPRLFFAGEHTIRNYPATVH | |
| | GALLSGLREAGRIADQFLGAMYTLPRQATPGVPAQQSPSM | |
| 607 | MAAIPALDPEAEPSMDVILVGSSELSSSVSPGTGRDLIAYEVKANQRNIEDIC | DNMT3L (AA) |
| | ICCGSLQVHTQHPLFEGGICAPCKDKFLDALFLYDDDGYQSYCSICSGETLL | |
| | ICGNPDCTRCYCFECVDSLVGPGTSGKVHAMSNWVCYLCLPSSSGLLQRR | |
| | RKWRSQLKAFYDRESENPLEMFETVPVWRRQPVRVLSLFEDIKKELTSLGF | |
| | LESGSDPGQLKHVVDVTDTVRKDVEEWGPFDLVYGATPPLGHTCDRPPSW | |
| | YLFQFHRLLQYARPKPGSPRPFFWMFVDNLVLNKEDLDVASRFLEMEPVTI | |
| | PDVHGGSLQNAVRVWSNIPAIRSRHWALVSEEELSLLAQNKQSSKLAAKW | |
| | PTKLVKNCFLPLREYFKYFSTELTSSL | |
| 608 | MGQTGKKSEKGPVCWRKRVKSEYMRLRQLKRFRRADEVKTMFSSNRQKI | EZH2 (AA) |
| | LERTETLNQEWKQRRIQPVHIMTSVSSLRGTRECSVTSDLDFPAQVIPLKTL | |
| | NAVASVPIMYSWSPLQQNFMVEDETVLHNIPYMGDEVLDQDGTFIEELIKN | |
| | YDGKVHGDRECGFINDEIFVELVNALGQYNDDDDDDDGDDPDEREEKQK | |
| | DLEDNRDDKETCPPRKFPADKIFEAISSMFPDKGTAEELKEKYKELTEQQLP | |
| | GALPPECTPNIDGPNAKSVQREQSLHSFHTLFCRRCFKYDCFLHPFHATPNT | |
| | YKRKNTETALDNKPCGPQCYQHLEGAKEFAAALTAERIKTPPKRPGGRRR | |
| | GRLPNNSSRPSTPTISVLESKDTDSDREAGTETGGENNDKEEEEKKDETSSS | |
| | SEANSRCQTPIKMKPNIEPPENVEWSGAEASMFRVLIGTYYDNFCAIARLIG | |
| | TKTCRQVYEFRVKESSIIAPVPTEDVDTPPRKKKRKHRLWAAHCRKIQLKK | |
| | DGSSNHVYNYQPCDHPRQPCDSSCPCVIAQNFCEKFCQCSSECQNRFPGCR | |
| | CKAQCNTKQCPCYLAVRECDPDLCLTCGAADHWDSKNVSCKNCSIQRGS | |
| | KKHLLLAPSDVAGWGIFIKDPVQKNEFISEYCGEIISQDEADRRGKVYDKY | |
| | MCSFLFNLNNDFVVDATRKGNKIRFANHSVNPNCYAKVMMVNGDHRIGIF | |
| | AKRAIQTGEELFFDYRYSQADALKYVGIEREMEIP | |
| 609 | GGGGS | GGGGS linker |
| | | (AA) |
| 610 | GGGGG | GGGGG linker |
| | | (AA) |
| 611 | GGAGG | GGAGG linker |
| | | (AA) |
| 612 | GGGGSSS | GGGGSSS linker |
| | | (AA) |
| 613 | GGGGAAA | GGGGAAA linker |
| | | (AA) |
| 614 | PKKKRKV | NLS-SV40 (AA) |
| 615 | PAAKRVKLD | NLS-cMyc (AA) |
| 616 | RQRRNELKRSP | NLS-cMyc (AA) |
| 617 | NQSSNFGPMKGGNFGGRSSGPYGGGGQYFAKPRNQGGY | NLS-hRNPA1 |
| | | M9 (AA) |
| 618 | RMRIZFKNKGKDTAELRRRRVEVSVELRKAKKDEQILKRRNV | NLS-IBB domain |
| | | importin-alpha |
| | | (AA) |
| 619 | VSRKRPRP | NLS-myoma T |
| | | protein (AA) |
| 620 | PPKKARED | NLS-myoma T |
| | | protein (AA) |
| 621 | PQPKKKPL | NLS-human p53 |
| | | (AA) |
| 622 | SALIKKKKKMAP | NLS-mouse c-abl |
| | | IV (AA) |
| 623 | DRLRR | NLS-influenza |
| | | NS1 (AA) |
| 624 | PKQKKRK | NLS-influenza |
| | | NS1 (AA) |
| 625 | RKLKKKIKKL | NLS-hepatitis |
| | | delta antigen |
| | | (AA) |
| 626 | REKKKFLKRR | NLS-mouse Mx1 |
| | | (AA) |
| 627 | KRKGDEVDGVDEVAKKKSKK | NLS-human |
| | | poly(ADP-ribose) |
| | | polymerase (AA) |
| 628 | RKCLQAGMNLEARKTKK | NLS- |
| | | glucocorticoid |
| | | (AA) |
| 629 | NGG | PAM-SpCas9 |
| 630 | NNGRRT | PAM-SaCas9 |
| 631 | NNNNGATT | PAM-N. |
| | | meningitidis |
| | | Cas9 |
| 632 | NNNNRYAC | PAM-C. jejuni |
| | | Cas9 |
| 633 | NNAGAAW | PAM-S. |
| | | thermophilus |
| 634 | NGG | PAM-F. Novicida |
| 635 | NAAAAC | PAM-T. denticola |
| 636 | TTTV | PAM- |
| | | Cas12a/Cpf1 |
| 637 | NGAN | Variant PAM- |
| | | SpCas9 variant |
| 638 | NGNG | Variant PAM- |
| | | SpCas9 variant |
| 639 | NGAG | Variant PAM- |
| | | SpCas9 variant |
| 640 | NGCG | Variant PAM- |
| | | SpCas9 variant |
| 641 | LLPKNYHLENEVARLKKLVGER | SunTag GCN4 |
| | | peptide (AA) |
| 642 | GGSGG | Linker (AA) |
| 643 | GGPSSGAPPPSGGSPAGSPTSTEEGTSESATPESGPGTSTEPSEGSAPGSPAGS | XTEN80 (aa) |
| | PTSTEEGTSTEPSEGSAPGTSTEPSE | |
| 644 | ATGGACTACAAAGACCATGACGGTGATTATAAAGATCATGACATCGAT | DNMT3A/L- |
| | TACAAGGATGACGATGACAAGCACGTTAACCACGATCAGGAGTTTGAC | dSpCas9-KRAB |
| | CCCCCTAAGGTGTACCCACCCGTGCCAGCCGAGAAGAGGAAGCCCATC | (nt) |
| | CGCGTGCTGTCCCTGTTCGACGGCATCGCCACAGGCCTGCTGGTGCTGA | |
| | AGGATCTGGGCATCCAGGTGGACAGATATATCGCCTCCGAGGTGTGCG | |
| | AGGATTCTATCACCGTGGGCATGGTGAGGCACCAGGGCAAGATCATGT | |
| | ACGTGGGCGACGTGCGCAGCGTGACACAGAAGCACATCCAGGAGTGGG | |
| | GACCCTTCGACCTGGTCATCGGAGGCAGCCCCTGTAATGACCTGTCCAT | |
| | CGTGAACCCTGCAAGGAAGGGCCTGTATGAGGGAACCGGCAGACTGTT | |
| | CTTTGAGTTCTACAGGCTGCTGCACGACGCCCGCCCTAAGGAGGGCGAT | |
| | GACAGGCCATTCTTTTGGCTGTTTGAGAACGTGGTGGCCATGGGCGTGA | |
| | GCGACAAGCGGGATATCTCCAGATTCCTGGAGTCTAATCCCGTGATGAT | |
| | CGATGCAAAGGAGGTGTCTGCCGCACACAGGGCAAGGTACTTTTGGGG | |
| | AAATCTGCCTGGCATGAACCGCCCACTGGCCAGCACCGTGAACGACAA | |
| | GCTGGAGCTGCAGGAGTGCCTGGAGCACGGAAGGATCGCCAAGTTCTC | |
| | CAAGGTGCGGACAATCACCACAAGATCTAACAGCATCAAGCAGGGCAA | |
| | GGATCAGCACTTCCCCGTGTTCATGAATGAGAAGGAGGACATCCTGTGG | |
| | TGTACCGAGATGGAGCGCGTGTTCGGCTTTCCAGTGCACTATACAGACG | |
| | TGAGCAATATGAGCCGGCTGGCAAGGCAGAGACTGCTGGGCCGGTCCT | |
| | GGTCTGTGCCAGTGATCAGACACCTGTTCGCCCCCCTGAAGGAGTACTT | |
| | TGCCTGCGTGTCTAGCGGCAACTCTAATGCCAACAGCAGAGGCCCTTCC | |
| | TTTTCCTCTGGCCTGGTGCCACTGTCTCTGAGGGGCAGCCACATGGGCC | |
| | CCATGGAGATCTACAAGACCGTGTCCGCCTGGAAGAGGCAGCCTGTGC | |
| | GCGTGCTGTCTCTGTTCCGCAACATCGACAAGGTGCTGAAGAGCCTGGG | |
| | CTTTCTGGAGAGCGGATCCGGATCTGGAGGAGGCACCCTGAAGTATGT | |
| | GGAGGATGTGACAAATGTGGTGCGGAGAGATGTGGAGAAGTGGGGCCC | |
| | CTTCGATCTGGTGTACGGATCCACCCAGCCACTGGGAAGCTCCTGCGAT | |
| | AGGTGTCCAGGATGGTATATGTTCCAGTTTCACAGAATCCTGCAGTACG | |
| | CACTGCCAAGGCAGGAGAGCCAGCGCCCTTTCTTTTGGATCTTTATGGA | |
| | CAACCTGCTGCTGACAGAGGATGACCAGGAGACAACAACCCGCTTCCT | |
| | GCAGACAGAGGCAGTGACCCTGCAGGATGTGAGGGGACGCGACTATCA | |
| | GAATGCCATGCGGGTGTGGTCTAACATCCCTGGCCTGAAGAGCAAGCA | |
| | CGCCCCCCTGACCCCTAAGGAGGAGGAGTACCTGCAGGCCCAGGTGCG | |
| | GAGCAGATCCAAGCTGGATGCCCCTAAGGTGGACCTGCTGGTGAAGAA | |
| | TTGTCTGCTGCCACTGCGGGAGTACTTCAAGTACTTTAGTCAGAATAGC | |
| | CTGCCACTGgaggcaagcggatccggaagggcatctcctggaatcccaggaagcacccgcAACCCC | |
| | AAGAAGAAGCGGAAGGTGGGCATCCACGGCGTGCCCGCCGCCGACAAG | |
| | AAGTACAGCATCGGCCTGGCCATCGGCACCAACAGCGTGGGCTGGGCC | |
| | GTGATCACCGACGAGTACAAGGTGCCCAGCAAGAAGTTCAAGGTGCTG | |
| | GGCAACACCGACCGGCACAGCATCAAGAAGAACCTGATCGGCGCCCTG | |
| | CTGTTCGACAGCGGCGAGACCGCCGAGGCCACCCGGCTGAAGCGGACC | |
| | GCCCGGCGGCGGTACACCCGGCGGAAGAACCGGATCTGCTACCTGCAG | |
| | GAGATCTTCAGCAACGAGATGGCCAAGGTGGACGACAGCTTCTTCCAC | |
| | CGGCTGGAGGAGAGCTTCCTGGTGGAGGAGGACAAGAAGCACGAGCG | |
| | GCACCCCATCTTCGGCAACATCGTGGACGAGGTGGCCTACCACGAGAA | |
| | GTACCCCACCATCTACCACCTGCGGAAGAAGCTGGTGGACAGCACCGA | |
| | CAAGGCCGACCTGCGGCTGATCTACCTGGCCCTGGCCCACATGATCAAG | |
| | TTCCGGGGCCACTTCCTGATCGAGGGCGACCTGAACCCCGACAACAGC | |
| | GACGTGGACAAGCTGTTCATCCAGCTGGTGCAGACCTACAACCAGCTGT | |
| | TCGAGGAGAACCCCATCAACGCCAGCGGCGTGGACGCCAAGGCCATCC | |
| | TGAGCGCCCGGCTGAGCAAGAGCCGGCGGCTGGAGAACCTGATCGCCC | |
| | AGCTGCCCGGCGAGAAGAAGAACGGCCTGTTCGGCAACCTGATCGCCC | |
| | TGAGCCTGGGCCTGACCCCCAACTTCAAGAGCAACTTCGACCTGGCCGA | |
| | GGACGCCAAGCTGCAGCTGAGCAAGGACACCTACGACGACGACCTGGA | |
| | CAACCTGCTGGCCCAGATCGGCGACCAGTACGCCGACCTGTTCCTGGCC | |
| | GCCAAGAACCTGAGCGACGCCATCCTGCTGAGCGACATCCTGCGGGTG | |
| | AACACCGAGATCACCAAGGCCCCCCTGAGCGCCAGCATGATCAAGCGG | |
| | TACGACGAGCACCACCAGGACCTGACCCTGCTGAAGGCCCTGGTGCGG | |
| | CAGCAGCTGCCCGAGAAGTACAAGGAGATCTTCTTCGACCAGAGCAAG | |
| | AACGGCTACGCCGGCTACATCGACGGCGGCGCCAGCCAGGAGGAGTTC | |
| | TACAAGTTCATCAAGCCCATCCTGGAGAAGATGGACGGCACCGAGGAG | |
| | CTGCTGGTGAAGCTGAACCGGGAGGACCTGCTGCGGAAGCAGCGGACC | |
| | TTCGACAACGGCAGCATCCCCCACCAGATCCACCTGGGCGAGCTGCAC | |
| | GCCATCCTGCGGCGGCAGGAGGACTTCTACCCCTTCCTGAAGGACAACC | |
| | GGGAGAAGATCGAGAAGATCCTGACCTTCCGGATCCCCTACTACGTGG | |
| | GCCCCCTGGCCCGGGGCAACAGCCGGTTCGCCTGGATGACCCGGAAGA | |
| | GCGAGGAGACCATCACCCCCTGGAACTTCGAGGAGGTGGTGGACAAGG | |
| | GCGCCAGCGCCCAGAGCTTCATCGAGCGGATGACCAACTTCGACAAGA | |
| | ACCTGCCCAACGAGAAGGTGCTGCCCAAGCACAGCCTGCTGTACGAGT | |
| | ACTTCACCGTGTACAACGAGCTGACCAAGGTGAAGTACGTGACCGAGG | |
| | GCATGCGGAAGCCCGCCTTCCTGAGCGGCGAGCAGAAGAAGGCCATCG | |
| | TGGACCTGCTGTTCAAGACCAACCGGAAGGTGACCGTGAAGCAGCTGA | |
| | AGGAGGACTACTTCAAGAAGATCGAGTGCTTCGACAGCGTGGAGATCA | |
| | GCGGCGTGGAGGACCGGTTCAACGCCAGCCTGGGCACCTACCACGACC | |
| | TGCTGAAGATCATCAAGGACAAGGACTTCCTGGACAACGAGGAGAACG | |
| | AGGACATCCTGGAGGACATCGTGCTGACCCTGACCCTGTTCGAGGACCG | |
| | GGAGATGATCGAGGAGCGGCTGAAGACCTACGCCCACCTGTTCGACGA | |
| | CAAGGTGATGAAGCAGCTGAAGCGGCGGCGGTACACCGGCTGGGGCCG | |
| | GCTGAGCCGGAAGCTGATCAACGGCATCCGGGACAAGCAGAGCGGCAA | |
| | GACCATCCTGGACTTCCTGAAGAGCGACGGCTTCGCCAACCGGAACTTC | |
| | ATGCAGCTGATCCACGACGACAGCCTGACCTTCAAGGAGGACATCCAG | |
| | AAGGCCCAGGTGAGCGGCCAGGGCGACAGCCTGCACGAGCACATCGCC | |
| | AACCTGGCCGGCAGCCCCGCCATCAAGAAGGGCATCCTGCAGACCGTG | |
| | AAGGTGGTGGACGAGCTGGTGAAGGTGATGGGCCGGCACAAGCCCGAG | |
| | AACATCGTGATCGAGATGGCCCGGGAGAACCAGACCACCCAGAAGGGC | |
| | CAGAAGAACAGCCGGGAGCGGATGAAGCGGATCGAGGAGGGCATCAA | |
| | GGAGCTGGGCAGCCAGATCCTGAAGGAGCACCCCGTGGAGAACACCCA | |
| | GCTGCAGAACGAGAAGCTGTACCTGTACTACCTGCAGAACGGCCGGGA | |
| | CATGTACGTGGACCAGGAGCTGGACATCAACCGGCTGAGCGACTACGA | |
| | CGTGGACGCCATCGTGCCCCAGAGCTTCCTGAAGGACGACAGCATCGA | |
| | CAACAAGGTGCTGACCCGGAGCGACAAGAACCGGGGCAAGAGCGACA | |
| | ACGTGCCCAGCGAGGAGGTGGTGAAGAAGATGAAGAACTACTGGCGGC | |
| | AGCTGCTGAACGCCAAGCTGATCACCCAGCGGAAGTTCGACAACCTGA | |
| | CCAAGGCCGAGCGGGGCGGCCTGAGCGAGCTGGACAAGGCCGGCTTCA | |
| | TCAAGCGGCAGCTGGTGGAGACCCGGCAGATCACCAAGCACGTGGCCC | |
| | AGATCCTGGACAGCCGGATGAACACCAAGTACGACGAGAACGACAAGC | |
| | TGATCCGGGAGGTGAAGGTGATCACCCTGAAGAGCAAGCTGGTGAGCG | |
| | ACTTCCGGAAGGACTTCCAGTTCTACAAGGTGCGGGAGATCAACAACT | |
| | ACCACCACGCCCACGACGCCTACCTGAACGCCGTGGTGGGCACCGCCCT | |
| | GATCAAGAAGTACCCCAAGCTGGAGAGCGAGTTCGTGTACGGCGACTA | |
| | CAAGGTGTACGACGTGCGGAAGATGATCGCCAAGAGCGAGCAGGAGAT | |
| | CGGCAAGGCCACCGCCAAGTACTTCTTCTACAGCAACATCATGAACTTC | |
| | TTCAAGACCGAGATCACCCTGGCCAACGGCGAGATCCGGAAGCGGCCC | |
| | CTGATCGAGACCAACGGCGAGACCGGCGAGATCGTGTGGGACAAGGGC | |
| | CGGGACTTCGCCACCGTGCGGAAGGTGCTGAGCATGCCCCAGGTGAAC | |
| | ATCGTGAAGAAGACCGAGGTGCAGACCGGCGGCTTCAGCAAGGAGAGC | |
| | ATCCTGCCCAAGCGGAACAGCGACAAGCTGATCGCCCGGAAGAAGGAC | |
| | TGGGACCCCAAGAAGTACGGCGGCTTCGACAGCCCCACCGTGGCCTAC | |
| | AGCGTGCTGGTGGTGGCCAAGGTGGAGAAGGGCAAGAGCAAGAAGCT | |
| | GAAGAGCGTGAAGGAGCTGCTGGGCATCACCATCATGGAGCGGAGCAG | |
| | CTTCGAGAAGAACCCCATCGACTTCCTGGAGGCCAAGGGCTACAAGGA | |
| | GGTGAAGAAGGACCTGATCATCAAGCTGCCCAAGTACAGCCTGTTCGA | |
| | GCTGGAGAACGGCCGGAAGCGGATGCTGGCCAGCGCCGGCGAGCTGCA | |
| | GAAGGGCAACGAGCTGGCCCTGCCCAGCAAGTACGTGAACTTCCTGTA | |
| | CCTGGCCAGCCACTACGAGAAGCTGAAGGGCAGCCCCGAGGACAACGA | |
| | GCAGAAGCAGCTGTTCGTGGAGCAGCACAAGCACTACCTGGACGAGAT | |
| | CATCGAGCAGATCAGCGAGTTCAGCAAGCGGGTGATCCTGGCCGACGC | |
| | CAACCTGGACAAGGTGCTGAGCGCCTACAACAAGCACCGGGACAAGCC | |
| | CATCCGGGAGCAGGCCGAGAACATCATCCACCTGTTCACCCTGACCAAC | |
| | CTGGGCGCCCCCGCCGCCTTCAAGTACTTCGACACCACCATCGACCGGA | |
| | AGCGGTACACCAGCACCAAGGAGGTGCTGGACGCCACCCTGATCCACC | |
| | AGAGCATCACCGGCCTGTACGAGACCCGGATCGACCTGAGCCAGCTGG | |
| | GCGGCGACAGCGGCGGCAAGCGGCCCGCCGCCACCAAGAAGGCCGGCC | |
| | AGGCCAAGAAGAAGAAGGctagCgatgctaagtcactgactgcctggtcccggacactggtgacct | |
| | tcaaggatgtgtttgtggacttcaccagggaggagtggaagctgctggacactgctcagcagatcctg | |
| | tacagaaatgtgatgctggagaactataagaacctggtttccttgggttatcagcttactaagccaga | |
| | tgtgatcctccggttggagaagggagaagagccctggctggtggagagagaaattcaccaagagaccc | |
| | atcctgattcagagactgcatttgaaatcaaatcatcagttCCGAAAAAGAAACGCAAAGTT | |
| 645 | MDYKDHDGDYKDHDIDYKDDDDKHVNHDQEFDPPKVYPPVPAEKRK | DNMT3A/L- |
| | PIRVLSLFDGIATGLLVLKDLGIQVDRYIASEVCEDSITVGMVRHQGKIMYV | dSpCas9- |
| | GDVRSVTQKHIQEWGPFDLVIGGSPCNDLSIVNPARKGLYEGTGRLFFEFY | KRAB (AA) |
| | RLLHDARPKEGDDRPFFWLFENVVAMGVSDKRDISRFLESNPVMIDAKEV | |
| | SAAHRARYFWGNLPGMNRPLASTVNDKLELQECLEHGRIAKFSKVRTITTR | |
| | SNSIKQGKDQHFPVFMNEKEDILWCTEMERVFGFPVHYTDVSNMSRLARQ | |
| | RLLGRSWSVPVIRHLFAPLKEYFACVSSGNSNANSRGPSFSSGLVPLSLRGS | |
| | HMGPMEIYKTVSAWKRQPVRVLSLFRNIDKVLKSLGFLESGSGSGGGTLK | |
| | YVEDVTNVVRRDVEKWGPFDLVYGSTQPLGSSCDRCPGWYMFQFHRILQ | |
| | YALPRQESQRPFFWIFMDNLLLTEDDQETTTRFLQTEAVTLQDVRGRDYQ | |
| | NAMRVWSNIPGLKSKHAPLTPKEEEYLQAQVRSRSKLDAPKVDLLVKNCL | |
| | LPLREYFKYFSQNSLPLEASGSGRASPGIPGSTRNPKKKRKVGIHGVPAADK | |
| | KYSIGLAIGTNSVGWAVITDEYKVPSKKFKVLGNTDRHSIKKNLIGALLFDS | |
| | GETAEATRLKRTARRRYTRRKNRICYLQEIFSNEMAKVDDSFFHRLEESFL | |
| | VEEDKKHERHPIFGNIVDEVAYHEKYPTIYHLRKKLVDSTDKADLRLIYLA | |
| | LAHMIKFRGHFLIEGDLNPDNSDVDKLFIQLVQTYNQLFEENPINASGVDA | |
| | KAILSARLSKSRRLENLIAQLPGEKKNGLFGNLIALSLGLTPNFKSNFDLAE | |
| | DAKLQLSKDTYDDDLDNLLAQIGDQYADLFLAAKNLSDAILLSDILRVNTE | |
| | ITKAPLSASMIKRYDEHHQDLTLLKALVRQQLPEKYKEIFFDQSKNGYAGY | |
| | IDGGASQEEFYKFIKPILEKMDGTEELLVKLNREDLLRKQRTFDNGSIPHQI | |
| | HLGELHAILRRQEDFYPFLKDNREKIEKILTFRIPYYVGPLARGNSRFAWMT | |
| | RKSEETITPWNFEEVVDKGASAQSFIERMTNFDKNLPNEKVLPKHSLLYEY | |
| | FTVYNELTKVKYVTEGMRKPAFLSGEQKKAIVDLLFKTNRKVTVKQLKED | |
| | YFKKIECFDSVEISGVEDRFNASLGTYHDLLKIIKDKDFLDNEENEDILEDIV | |
| | LTLTLFEDREMIEERLKTYAHLFDDKVMKQLKRRRYTGWGRLSRKLINGIR | |
| | DKQSGKTILDFLKSDGFANRNFMQLIHDDSLTFKEDIQKAQVSGQGDSLHE | |
| | HIANLAGSPAIKKGILQTVKVVDELVKVMGRHKPENIVIEMARENQTTQKG | |
| | QKNSRERMKRIEEGIKELGSQILKEHPVENTQLQNEKLYLYYLQNGRDMY | |
| | VDQELDINRLSDYDVDAIVPQSFLKDDSIDNKVLTRSDKNRGKSDNVPSEE | |
| | VVKKMKNYWRQLLNAKLITQRKFDNLTKAERGGLSELDKAGFIKRQLVET | |
| | RQITKHVAQILDSRMNTKYDENDKLIREVKVITLKSKLVSDFRKDFQFYKV | |
| | REINNYHHAHDAYLNAVVGTALIKKYPKLESEFVYGDYKVYDVRKMIAKS | |
| | EQEIGKATAKYFFYSNIMNFFKTEITLANGEIRKRPLIETNGETGEIVWDKG | |
| | RDFATVRKVLSMPQVNIVKKTEVQTGGFSKESILPKRNSDKLIARKKDWDP | |
| | KKYGGFDSPTVAYSVLVVAKVEKGKSKKLKSVKELLGITIMERSSFEKNPI | |
| | DFLEAKGYKEVKKDLIIKLPKYSLFELENGRKRMLASAGELQKGNELALPS | |
| | KYVNFLYLASHYEKLKGSPEDNEQKQLFVEQHKHYLDEIIEQISEFSKRVIL | |
| | ADANLDKVLSAYNKHRDKPIREQAENIIHLFTLTNLGAPAAFKYFDTTIDR | |
| | KRYTSTKEVLDATLIHQSITGLYETRIDLSQLGGDSGGKRPAATKKAGQAK | |
| | KKKASDAKSLTAWSRTLVTFKDVFVDFTREEWKLLDTAQQILYRNVMLE | |
| | NYKNLVSLGYQLTKPDVILRLEKGEEPWLVEREIHQETHPDSETAFEIKSSV | |
| | PKKKRKV | |
| 646 | ATGAACCACGATCAGGAGTTTGACCCCCCTAAGGTGTACCCACCCGTGC | DNMT3A/L- |
| | CAGCCGAGAAGAGGAAGCCCATCCGCGTGCTGTCCCTGTTCGACGGCA | XTEN80-dSpCas9- |
| | TCGCCACAGGCCTGCTGGTGCTGAAGGATCTGGGCATCCAGGTGGACA | KRAB (nt) |
| | GATATATCGCCTCCGAGGTGTGCGAGGATTCTATCACCGTGGGCATGGT | |
| | GAGGCACCAGGGCAAGATCATGTACGTGGGCGACGTGCGCAGCGTGAC | |
| | ACAGAAGCACATCCAGGAGTGGGGACCCTTCGACCTGGTCATCGGAGG | |
| | CAGCCCCTGTAATGACCTGTCCATCGTGAACCCTGCAAGGAAGGGCCTG | |
| | TATGAGGGAACCGGCAGACTGTTCTTTGAGTTCTACAGGCTGCTGCACG | |
| | ACGCCCGCCCTAAGGAGGGCGATGACAGGCCATTCTTTTGGCTGTTTGA | |
| | GAACGTGGTGGCCATGGGCGTGAGCGACAAGCGGGATATCTCCAGATT | |
| | CCTGGAGTCTAATCCCGTGATGATCGATGCAAAGGAGGTGTCTGCCGCA | |
| | CACAGGGCAAGGTACTTTTGGGGAAATCTGCCTGGCATGAACCGCCCA | |
| | CTGGCCAGCACCGTGAACGACAAGCTGGAGCTGCAGGAGTGCCTGGAG | |
| | CACGGAAGGATCGCCAAGTTCTCCAAGGTGCGGACAATCACCACAAGA | |
| | TCTAACAGCATCAAGCAGGGCAAGGATCAGCACTTCCCCGTGTTCATGA | |
| | ATGAGAAGGAGGACATCCTGTGGTGTACCGAGATGGAGCGCGTGTTCG | |
| | GCTTTCCAGTGCACTATACAGACGTGAGCAATATGAGCCGGCTGGCAA | |
| | GGCAGAGACTGCTGGGCCGGTCCTGGTCTGTGCCAGTGATCAGACACCT | |
| | GTTCGCCCCCCTGAAGGAGTACTTTGCCTGCGTGTCTAGCGGCAACTCT | |
| | AATGCCAACAGCAGAGGCCCTTCCTTTTCCTCTGGCCTGGTGCCACTGT | |
| | CTCTGAGGGGCAGCCACATGGGCCCCATGGAGATCTACAAGACCGTGT | |
| | CCGCCTGGAAGAGGCAGCCTGTGCGCGTGCTGTCTCTGTTCCGCAACAT | |
| | CGACAAGGTGCTGAAGAGCCTGGGCTTTCTGGAGAGCGGATCCGGATC | |
| | TGGAGGAGGCACCCTGAAGTATGTGGAGGATGTGACAAATGTGGTGCG | |
| | GAGAGATGTGGAGAAGTGGGGCCCCTTCGATCTGGTGTACGGATCCAC | |
| | CCAGCCACTGGGAAGCTCCTGCGATAGGTGTCCAGGATGGTATATGTTC | |
| | CAGTTTCACAGAATCCTGCAGTACGCACTGCCAAGGCAGGAGAGCCAG | |
| | CGCCCTTTCTTTTGGATCTTTATGGACAACCTGCTGCTGACAGAGGATG | |
| | ACCAGGAGACAACAACCCGCTTCCTGCAGACAGAGGCAGTGACCCTGC | |
| | AGGATGTGAGGGGACGCGACTATCAGAATGCCATGCGGGTGTGGTCTA | |
| | ACATCCCTGGCCTGAAGAGCAAGCACGCCCCCCTGACCCCTAAGGAGG | |
| | AGGAGTACCTGCAGGCCCAGGTGCGGAGCAGATCCAAGCTGGATGCCC | |
| | CTAAGGTGGACCTGCTGGTGAAGAATTGTCTGCTGCCACTGCGGGAGTA | |
| | CTTCAAGTACTTTAGTCAGAATAGCCTGCCACTGGGAGGGCCGAGCTCT | |
| | GGCGCACCCCCACCAAGTGGAGGGTCTCCTGCCGGGTCCCCAACATCTA | |
| | CTGAAGAAGGCACCAGCGAATCCGCAACGCCCGAGTCAGGCCCTGGTA | |
| | CCTCCACAGAACCATCTGAAGGTAGTGCGCCTGGTTCCCCAGCTGGAAG | |
| | CCCTACTTCCACCGAAGAAGGCACGTCAACCGAACCAAGTGAAGGATC | |
| | TGCCCCTGGGACCAGCACTGAACCATCTGAGGTTAACCCCAAGAAGAA | |
| | GCGGAAGGTGGGCATCCACGGCGTGCCCGCCGCCGACAAGAAGTACAG | |
| | CATCGGCCTGGCCATCGGCACCAACAGCGTGGGCTGGGCCGTGATCAC | |
| | CGACGAGTACAAGGTGCCCAGCAAGAAGTTCAAGGTGCTGGGCAACAC | |
| | CGACCGGCACAGCATCAAGAAGAACCTGATCGGCGCCCTGCTGTTCGA | |
| | CAGCGGCGAGACCGCCGAGGCCACCCGGCTGAAGCGGACCGCCCGGCG | |
| | GCGGTACACCCGGCGGAAGAACCGGATCTGCTACCTGCAGGAGATCTT | |
| | CAGCAACGAGATGGCCAAGGTGGACGACAGCTTCTTCCACCGGCTGGA | |
| | GGAGAGCTTCCTGGTGGAGGAGGACAAGAAGCACGAGCGGCACCCCAT | |
| | CTTCGGCAACATCGTGGACGAGGTGGCCTACCACGAGAAGTACCCCAC | |
| | CATCTACCACCTGCGGAAGAAGCTGGTGGACAGCACCGACAAGGCCGA | |
| | CCTGCGGCTGATCTACCTGGCCCTGGCCCACATGATCAAGTTCCGGGGC | |
| | CACTTCCTGATCGAGGGCGACCTGAACCCCGACAACAGCGACGTGGAC | |
| | AAGCTGTTCATCCAGCTGGTGCAGACCTACAACCAGCTGTTCGAGGAGA | |
| | ACCCCATCAACGCCAGCGGCGTGGACGCCAAGGCCATCCTGAGCGCCC | |
| | GGCTGAGCAAGAGCCGGCGGCTGGAGAACCTGATCGCCCAGCTGCCCG | |
| | GCGAGAAGAAGAACGGCCTGTTCGGCAACCTGATCGCCCTGAGCCTGG | |
| | GCCTGACCCCCAACTTCAAGAGCAACTTCGACCTGGCCGAGGACGCCA | |
| | AGCTGCAGCTGAGCAAGGACACCTACGACGACGACCTGGACAACCTGC | |
| | TGGCCCAGATCGGCGACCAGTACGCCGACCTGTTCCTGGCCGCCAAGA | |
| | ACCTGAGCGACGCCATCCTGCTGAGCGACATCCTGCGGGTGAACACCG | |
| | AGATCACCAAGGCCCCCCTGAGCGCCAGCATGATCAAGCGGTACGACG | |
| | AGCACCACCAGGACCTGACCCTGCTGAAGGCCCTGGTGCGGCAGCAGC | |
| | TGCCCGAGAAGTACAAGGAGATCTTCTTCGACCAGAGCAAGAACGGCT | |
| | ACGCCGGCTACATCGACGGCGGCGCCAGCCAGGAGGAGTTCTACAAGT | |
| | TCATCAAGCCCATCCTGGAGAAGATGGACGGCACCGAGGAGCTGCTGG | |
| | TGAAGCTGAACCGGGAGGACCTGCTGCGGAAGCAGCGGACCTTCGACA | |
| | ACGGCAGCATCCCCCACCAGATCCACCTGGGCGAGCTGCACGCCATCCT | |
| | GCGGCGGCAGGAGGACTTCTACCCCTTCCTGAAGGACAACCGGGAGAA | |
| | GATCGAGAAGATCCTGACCTTCCGGATCCCCTACTACGTGGGCCCCCTG | |
| | GCCCGGGGCAACAGCCGGTTCGCCTGGATGACCCGGAAGAGCGAGGAG | |
| | ACCATCACCCCCTGGAACTTCGAGGAGGTGGTGGACAAGGGCGCCAGC | |
| | GCCCAGAGCTTCATCGAGCGGATGACCAACTTCGACAAGAACCTGCCC | |
| | AACGAGAAGGTGCTGCCCAAGCACAGCCTGCTGTACGAGTACTTCACC | |
| | GTGTACAACGAGCTGACCAAGGTGAAGTACGTGACCGAGGGCATGCGG | |
| | AAGCCCGCCTTCCTGAGCGGCGAGCAGAAGAAGGCCATCGTGGACCTG | |
| | CTGTTCAAGACCAACCGGAAGGTGACCGTGAAGCAGCTGAAGGAGGAC | |
| | TACTTCAAGAAGATCGAGTGCTTCGACAGCGTGGAGATCAGCGGCGTG | |
| | GAGGACCGGTTCAACGCCAGCCTGGGCACCTACCACGACCTGCTGAAG | |
| | ATCATCAAGGACAAGGACTTCCTGGACAACGAGGAGAACGAGGACATC | |
| | CTGGAGGACATCGTGCTGACCCTGACCCTGTTCGAGGACCGGGAGATG | |
| | ATCGAGGAGCGGCTGAAGACCTACGCCCACCTGTTCGACGACAAGGTG | |
| | ATGAAGCAGCTGAAGCGGCGGCGGTACACCGGCTGGGGCCGGCTGAGC | |
| | CGGAAGCTGATCAACGGCATCCGGGACAAGCAGAGCGGCAAGACCATC | |
| | CTGGACTTCCTGAAGAGCGACGGCTTCGCCAACCGGAACTTCATGCAGC | |
| | TGATCCACGACGACAGCCTGACCTTCAAGGAGGACATCCAGAAGGCCC | |
| | AGGTGAGCGGCCAGGGCGACAGCCTGCACGAGCACATCGCCAACCTGG | |
| | CCGGCAGCCCCGCCATCAAGAAGGGCATCCTGCAGACCGTGAAGGTGG | |
| | TGGACGAGCTGGTGAAGGTGATGGGCCGGCACAAGCCCGAGAACATCG | |
| | TGATCGAGATGGCCCGGGAGAACCAGACCACCCAGAAGGGCCAGAAG | |
| | AACAGCCGGGAGCGGATGAAGCGGATCGAGGAGGGCATCAAGGAGCT | |
| | GGGCAGCCAGATCCTGAAGGAGCACCCCGTGGAGAACACCCAGCTGCA | |
| | GAACGAGAAGCTGTACCTGTACTACCTGCAGAACGGCCGGGACATGTA | |
| | CGTGGACCAGGAGCTGGACATCAACCGGCTGAGCGACTACGACGTGGA | |
| | CGCCATCGTGCCCCAGAGCTTCCTGAAGGACGACAGCATCGACAACAA | |
| | GGTGCTGACCCGGAGCGACAAGAACCGGGGCAAGAGCGACAACGTGCC | |
| | CAGCGAGGAGGTGGTGAAGAAGATGAAGAACTACTGGCGGCAGCTGCT | |
| | GAACGCCAAGCTGATCACCCAGCGGAAGTTCGACAACCTGACCAAGGC | |
| | CGAGCGGGGCGGCCTGAGCGAGCTGGACAAGGCCGGCTTCATCAAGCG | |
| | GCAGCTGGTGGAGACCCGGCAGATCACCAAGCACGTGGCCCAGATCCT | |
| | GGACAGCCGGATGAACACCAAGTACGACGAGAACGACAAGCTGATCCG | |
| | GGAGGTGAAGGTGATCACCCTGAAGAGCAAGCTGGTGAGCGACTTCCG | |
| | GAAGGACTTCCAGTTCTACAAGGTGCGGGAGATCAACAACTACCACCA | |
| | CGCCCACGACGCCTACCTGAACGCCGTGGTGGGCACCGCCCTGATCAA | |
| | GAAGTACCCCAAGCTGGAGAGCGAGTTCGTGTACGGCGACTACAAGGT | |
| | GTACGACGTGCGGAAGATGATCGCCAAGAGCGAGCAGGAGATCGGCAA | |
| | GGCCACCGCCAAGTACTTCTTCTACAGCAACATCATGAACTTCTTCAAG | |
| | ACCGAGATCACCCTGGCCAACGGCGAGATCCGGAAGCGGCCCCTGATC | |
| | GAGACCAACGGCGAGACCGGCGAGATCGTGTGGGACAAGGGCCGGGA | |
| | CTTCGCCACCGTGCGGAAGGTGCTGAGCATGCCCCAGGTGAACATCGTG | |
| | AAGAAGACCGAGGTGCAGACCGGCGGCTTCAGCAAGGAGAGCATCCTG | |
| | CCCAAGCGGAACAGCGACAAGCTGATCGCCCGGAAGAAGGACTGGGAC | |
| | CCCAAGAAGTACGGCGGCTTCGACAGCCCCACCGTGGCCTACAGCGTG | |
| | CTGGTGGTGGCCAAGGTGGAGAAGGGCAAGAGCAAGAAGCTGAAGAG | |
| | CGTGAAGGAGCTGCTGGGCATCACCATCATGGAGCGGAGCAGCTTCGA | |
| | GAAGAACCCCATCGACTTCCTGGAGGCCAAGGGCTACAAGGAGGTGAA | |
| | GAAGGACCTGATCATCAAGCTGCCCAAGTACAGCCTGTTCGAGCTGGA | |
| | GAACGGCCGGAAGCGGATGCTGGCCAGCGCCGGCGAGCTGCAGAAGG | |
| | GCAACGAGCTGGCCCTGCCCAGCAAGTACGTGAACTTCCTGTACCTGGC | |
| | CAGCCACTACGAGAAGCTGAAGGGCAGCCCCGAGGACAACGAGCAGA | |
| | AGCAGCTGTTCGTGGAGCAGCACAAGCACTACCTGGACGAGATCATCG | |
| | AGCAGATCAGCGAGTTCAGCAAGCGGGTGATCCTGGCCGACGCCAACC | |
| | TGGACAAGGTGCTGAGCGCCTACAACAAGCACCGGGACAAGCCCATCC | |
| | GGGAGCAGGCCGAGAACATCATCCACCTGTTCACCCTGACCAACCTGG | |
| | GCGCCCCCGCCGCCTTCAAGTACTTCGACACCACCATCGACCGGAAGCG | |
| | GTACACCAGCACCAAGGAGGTGCTGGACGCCACCCTGATCCACCAGAG | |
| | CATCACCGGCCTGTACGAGACCCGGATCGACCTGAGCCAGCTGGGCGG | |
| | CGACAGCGGCGGCAAGCGGCCCGCCGCCACCAAGAAGGCCGGCCAGGC | |
| | CAAGAAGAAGAAGGctagCgatgctaagtcactgactgcctggtcccggacactggtgaccttcaagga | |
| | tgtgtttgtggacttcaccagggaggagtggaagctgctggacactgctcagcagatcctgtacagaa | |
| | atgtgatgctggagaactataagaacctggtttccttgggttatcagcttactaagccagatgtgat | |
| | cctccggttggagaagggagaagagccctggctggtggagagagaaattcaccaagagacccatcct | |
| | gattcagagactgcatttgaaatcaaatcatcagttCCGAAAAAGAAACGCAAAGTTTAG | |
| 647 | MNHDQEFDPPKVYPPVPAEKRKPIRVLSLFDGIATGLLVLKDLGIQVDRYIA | DNMT3A/L- |
| | SEVCEDSITVGMVRHQGKIMYVGDVRSVTQKHIQEWGPFDLVIGGSPCND | XTEN80-dSpCas9- |
| | LSIVNPARKGLYEGTGRLFFEFYRLLHDARPKEGDDRPFFWLFENVVAMG | KRAB (AA) |
| | VSDKRDISRFLESNPVMIDAKEVSAAHRARYFWGNLPGMNRPLASTVNDK | |
| | LELQECLEHGRIAKFSKVRTITTRSNSIKQGKDQHFPVFMNEKEDILWCTEM | |
| | ERVFGFPVHYTDVSNMSRLARQRLLGRSWSVPVIRHLFAPLKEYFACVSSG | |
| | NSNANSRGPSFSSGLVPLSLRGSHMGPMEIYKTVSAWKRQPVRVLSLFRNI | |
| | DKVLKSLGFLESGSGSGGGTLKYVEDVTNVVRRDVEKWGPFDLVYGSTQP | |
| | LGSSCDRCPGWYMFQFHRILQYALPRQESQRPFFWIFMDNLLLTEDDQETT | |
| | TRFLQTEAVTLQDVRGRDYQNAMRVWSNIPGLKSKHAPLTPKEEEYLQAQ | |
| | VRSRSKLDAPKVDLLVKNCLLPLREYFKYFSQNSLPLGGPSSGAPPPSGGSP | |
| | AGSPTSTEEGTSESATPESGPGTSTEPSEGSAPGSPAGSPTSTEEGTSTEPSEG | |
| | SAPGTSTEPSEVNPKKKRKVGIHGVPAADKKYSIGLAIGTNSVGWAVITDE | |
| | YKVPSKKFKVLGNTDRHSIKKNLIGALLFDSGETAEATRLKRTARRRYTRR | |
| | KNRICYLQEIFSNEMAKVDDSFFHRLEESFLVEEDKKHERHPIFGNIVDEVA | |
| | YHEKYPTIYHLRKKLVDSTDKADLRLIYLALAHMIKFRGHFLIEGDLNPDN | |
| | SDVDKLFIQLVQTYNQLFEENPINASGVDAKAILSARLSKSRRLENLIAQLP | |
| | GEKKNGLFGNLIALSLGLTPNFKSNFDLAEDAKLQLSKDTYDDDLDNLLA | |
| | QIGDQYADLFLAAKNLSDAILLSDILRVNTEITKAPLSASMIKRYDEHHQDL | |
| | TLLKALVRQQLPEKYKEIFFDQSKNGYAGYIDGGASQEEFYKFIKPILEKMD | |
| | GTEELLVKLNREDLLRKQRTFDNGSIPHQIHLGELHAILRRQEDFYPFLKDN | |
| | REKIEKILTFRIPYYVGPLARGNSRFAWMTRKSEETITPWNFEEVVDKGASA | |
| | QSFIERMTNFDKNLPNEKVLPKHSLLYEYFTVYNELTKVKYVTEGMRKPA | |
| | FLSGEQKKAIVDLLFKTNRKVTVKQLKEDYFKKIECFDSVEISGVEDRFNAS | |
| | LGTYHDLLKIIKDKDFLDNEENEDILEDIVLTLTLFEDREMIEERLKTYAHLF | |
| | DDKVMKQLKRRRYTGWGRLSRKLINGIRDKQSGKTILDFLKSDGFANRNF | |
| | MQLIHDDSLTFKEDIQKAQVSGQGDSLHEHIANLAGSPAIKKGILQTVKVV | |
| | DELVKVMGRHKPENIVIEMARENQTTQKGQKNSRERMKRIEEGIKELGSQI | |
| | LKEHPVENTQLQNEKLYLYYLQNGRDMYVDQELDINRLSDYDVDAIVPQS | |
| | FLKDDSIDNKVLTRSDKNRGKSDNVPSEEVVKKMKNYWRQLLNAKLITQR | |
| | KFDNLTKAERGGLSELDKAGFIKRQLVETRQITKHVAQILDSRMNTKYDEN | |
| | DKLIREVKVITLKSKLVSDFRKDFQFYKVREINNYHHAHDAYLNAVVGTA | |
| | LIKKYPKLESEFVYGDYKVYDVRKMIAKSEQEIGKATAKYFFYSNIMNFFK | |
| | TEITLANGEIRKRPLIETNGETGEIVWDKGRDFATVRKVLSMPQVNIVKKTE | |
| | VQTGGFSKESILPKRNSDKLIARKKDWDPKKYGGFDSPTVAYSVLVVAKV | |
| | EKGKSKKLKSVKELLGITIMERSSFEKNPIDFLEAKGYKEVKKDLIIKLPKYS | |
| | LFELENGRKRMLASAGELQKGNELALPSKYVNFLYLASHYEKLKGSPEDN | |
| | EQKQLFVEQHKHYLDEIIEQISEFSKRVILADANLDKVLSAYNKHRDKPIRE | |
| | QAENIIHLFTLTNLGAPAAFKYFDTTIDRKRYTSTKEVLDATLIHQSITGLYE | |
| | TRIDLSQLGGDSGGKRPAATKKAGQAKKKKASDAKSLTAWSRTLVTFKD | |
| | VFVDFTREEWKLLDTAQQILYRNVMLENYKNLVSLGYQLTKPDVILRLEK | |
| | GEEPWLVEREIHQETHPDSETAFEIKSSVPKKKRKV | |
| 648 | AGTAACCATGACCAGGAATTTGACCCCCCAAAGGTTTACCCACCTGTGC | DNMT3A/L(CRIS |
| | CAGCTGAGAAGAGGAAGCCCATCCGCGTGCTGTCTCTCTTTGATGGGAT | PROFF)-XTEN80- |
| | TGCTACAGGGCTCCTGGTGCTGAAGGACCTGGGCATCCAAGTGGACCG | dSpCas9-KRAB |
| | CTACATTGCCTCCGAGGTGTGTGAGGACTCCATCACGGTGGGCATGGTG | (nt) |
| | CGGCACCAGGGAAAGATCATGTACGTCGGGGACGTCCGCAGCGTCACA | |
| | CAGAAGCATATCCAGGAGTGGGGCCCATTCGACCTGGTGATTGGAGGC | |
| | AGTCCCTGCAATGACCTCTCCATTGTCAACCCTGCCCGCAAGGGACTTT | |
| | ATGAGGGTACTGGCCGCCTCTTCTTTGAGTTCTACCGCCTCCTGCATGAT | |
| | GCGCGGCCCAAGGAGGGAGATGATCGCCCCTTCTTCTGGCTCTTTGAGA | |
| | ATGTGGTGGCCATGGGCGTTAGTGACAAGAGGGACATCTCGCGATTTCT | |
| | TGAGTCTAACCCCGTGATGATTGACGCCAAAGAAGTGTCTGCTGCACAC | |
| | AGGGCCCGTTACTTCTGGGGTAACCTTCCTGGCATGAACAGGCCTTTGG | |
| | CATCCACTGTGAATGATAAGCTGGAGCTGCAAGAGTGTCTGGAGCACG | |
| | GCAGAATAGCCAAGTTCAGCAAAGTGAGGACCATTACCACCAGGTCAA | |
| | ACTCTATAAAGCAGGGCAAAGACCAGCATTTCCCCGTCTTCATGAACGA | |
| | GAAGGAGGACATCCTGTGGTGCACTGAAATGGAAAGGGTGTTTGGCTT | |
| | CCCCGTCCACTACACAGACGTCTCCAACATGAGCCGCTTGGCGAGGCAG | |
| | AGACTGCTGGGCCGATCGTGGAGCGTGCCGGTCATCCGCCACCTCTTCG | |
| | CTCCGCTGAAGGAATATTTTGCTTGTGTGTCTAGCGGCAATAGTAACGC | |
| | TAACAGCCGCGGGCCGAGCTTCAGCAGCGGCCTGGTGCCGTTAAGCTTG | |
| | CGCGGCAGCCATATGGGCCCTATGGAGATATACAAGACAGTGTCTGCA | |
| | TGGAAGAGACAGCCAGTGCGGGTACTGAGCCTCTTCAGAAACATCGAC | |
| | AAGGTACTAAAGAGTTTGGGCTTCTTGGAAAGCGGTTCTGGTTCTGGGG | |
| | GAGGAACGCTGAAGTACGTGGAAGATGTCACAAATGTCGTGAGGAGAG | |
| | ACGTGGAGAAATGGGGCCCCTTTGACCTGGTGTACGGCTCGACGCAGC | |
| | CCCTAGGCAGCTCTTGTGATCGCTGTCCCGGCTGGTACATGTTCCAGTTC | |
| | CACCGGATCCTGCAGTATGCGCTGCCTCGCCAGGAGAGTCAGCGGCCCT | |
| | TCTTCTGGATATTCATGGACAATCTGCTGCTGACTGAGGATGACCAAGA | |
| | GACAACTACCCGCTTCCTTCAGACAGAGGCTGTGACCCTCCAGGATGTC | |
| | CGTGGCAGAGACTACCAGAATGCTATGCGGGTGTGGAGCAACATTCCA | |
| | GGGCTGAAGAGCAAGCATGCGCCCCTGACCCCAAAGGAAGAAGAGTAT | |
| | CTGCAAGCCCAAGTCAGAAGCAGGAGCAAGCTGGACGCCCCGAAAGTT | |
| | GACCTCCTGGTGAAGAACTGCCTTCTCCCGCTGAGAGAGTACTTCAAGT | |
| | ATTTTTCTCAAAACTCACTTCCTCTTGGAGGGCCGAGCTCTGGCGCACC | |
| | CCCACCAAGTGGAGGGTCTCCTGCCGGGTCCCCAACATCTACTGAAGAA | |
| | GGCACCAGCGAATCCGCAACGCCCGAGTCAGGCCCTGGTACCTCCACA | |
| | GAACCATCTGAAGGTAGTGCGCCTGGTTCCCCAGCTGGAAGCCCTACTT | |
| | CCACCGAAGAAGGCACGTCAACCGAACCAAGTGAAGGATCTGCCCCTG | |
| | GGACCAGCACTGAACCATCTGAGGTTAACCCCAAGAAGAAGCGGAAGG | |
| | TGGGCATCCACGGCGTGCCCGCCGCCGACAAGAAGTACAGCATCGGCC | |
| | TGGCCATCGGCACCAACAGCGTGGGCTGGGCCGTGATCACCGACGAGT | |
| | ACAAGGTGCCCAGCAAGAAGTTCAAGGTGCTGGGCAACACCGACCGGC | |
| | ACAGCATCAAGAAGAACCTGATCGGCGCCCTGCTGTTCGACAGCGGCG | |
| | AGACCGCCGAGGCCACCCGGCTGAAGCGGACCGCCCGGCGGCGGTACA | |
| | CCCGGCGGAAGAACCGGATCTGCTACCTGCAGGAGATCTTCAGCAACG | |
| | AGATGGCCAAGGTGGACGACAGCTTCTTCCACCGGCTGGAGGAGAGCT | |
| | TCCTGGTGGAGGAGGACAAGAAGCACGAGCGGCACCCCATCTTCGGCA | |
| | ACATCGTGGACGAGGTGGCCTACCACGAGAAGTACCCCACCATCTACC | |
| | ACCTGCGGAAGAAGCTGGTGGACAGCACCGACAAGGCCGACCTGCGGC | |
| | TGATCTACCTGGCCCTGGCCCACATGATCAAGTTCCGGGGCCACTTCCT | |
| | GATCGAGGGCGACCTGAACCCCGACAACAGCGACGTGGACAAGCTGTT | |
| | CATCCAGCTGGTGCAGACCTACAACCAGCTGTTCGAGGAGAACCCCATC | |
| | AACGCCAGCGGCGTGGACGCCAAGGCCATCCTGAGCGCCCGGCTGAGC | |
| | AAGAGCCGGCGGCTGGAGAACCTGATCGCCCAGCTGCCCGGCGAGAAG | |
| | AAGAACGGCCTGTTCGGCAACCTGATCGCCCTGAGCCTGGGCCTGACCC | |
| | CCAACTTCAAGAGCAACTTCGACCTGGCCGAGGACGCCAAGCTGCAGC | |
| | TGAGCAAGGACACCTACGACGACGACCTGGACAACCTGCTGGCCCAGA | |
| | TCGGCGACCAGTACGCCGACCTGTTCCTGGCCGCCAAGAACCTGAGCG | |
| | ACGCCATCCTGCTGAGCGACATCCTGCGGGTGAACACCGAGATCACCA | |
| | AGGCCCCCCTGAGCGCCAGCATGATCAAGCGGTACGACGAGCACCACC | |
| | AGGACCTGACCCTGCTGAAGGCCCTGGTGCGGCAGCAGCTGCCCGAGA | |
| | AGTACAAGGAGATCTTCTTCGACCAGAGCAAGAACGGCTACGCCGGCT | |
| | ACATCGACGGCGGCGCCAGCCAGGAGGAGTTCTACAAGTTCATCAAGC | |
| | CCATCCTGGAGAAGATGGACGGCACCGAGGAGCTGCTGGTGAAGCTGA | |
| | ACCGGGAGGACCTGCTGCGGAAGCAGCGGACCTTCGACAACGGCAGCA | |
| | TCCCCCACCAGATCCACCTGGGCGAGCTGCACGCCATCCTGCGGCGGCA | |
| | GGAGGACTTCTACCCCTTCCTGAAGGACAACCGGGAGAAGATCGAGAA | |
| | GATCCTGACCTTCCGGATCCCCTACTACGTGGGCCCCCTGGCCCGGGGC | |
| | AACAGCCGGTTCGCCTGGATGACCCGGAAGAGCGAGGAGACCATCACC | |
| | CCCTGGAACTTCGAGGAGGTGGTGGACAAGGGCGCCAGCGCCCAGAGC | |
| | TTCATCGAGCGGATGACCAACTTCGACAAGAACCTGCCCAACGAGAAG | |
| | GTGCTGCCCAAGCACAGCCTGCTGTACGAGTACTTCACCGTGTACAACG | |
| | AGCTGACCAAGGTGAAGTACGTGACCGAGGGCATGCGGAAGCCCGCCT | |
| | TCCTGAGCGGCGAGCAGAAGAAGGCCATCGTGGACCTGCTGTTCAAGA | |
| | CCAACCGGAAGGTGACCGTGAAGCAGCTGAAGGAGGACTACTTCAAGA | |
| | AGATCGAGTGCTTCGACAGCGTGGAGATCAGCGGCGTGGAGGACCGGT | |
| | TCAACGCCAGCCTGGGCACCTACCACGACCTGCTGAAGATCATCAAGG | |
| | ACAAGGACTTCCTGGACAACGAGGAGAACGAGGACATCCTGGAGGACA | |
| | TCGTGCTGACCCTGACCCTGTTCGAGGACCGGGAGATGATCGAGGAGC | |
| | GGCTGAAGACCTACGCCCACCTGTTCGACGACAAGGTGATGAAGCAGC | |
| | TGAAGCGGCGGCGGTACACCGGCTGGGGCCGGCTGAGCCGGAAGCTGA | |
| | TCAACGGCATCCGGGACAAGCAGAGCGGCAAGACCATCCTGGACTTCC | |
| | TGAAGAGCGACGGCTTCGCCAACCGGAACTTCATGCAGCTGATCCACG | |
| | ACGACAGCCTGACCTTCAAGGAGGACATCCAGAAGGCCCAGGTGAGCG | |
| | GCCAGGGCGACAGCCTGCACGAGCACATCGCCAACCTGGCCGGCAGCC | |
| | CCGCCATCAAGAAGGGCATCCTGCAGACCGTGAAGGTGGTGGACGAGC | |
| | TGGTGAAGGTGATGGGCCGGCACAAGCCCGAGAACATCGTGATCGAGA | |
| | TGGCCCGGGAGAACCAGACCACCCAGAAGGGCCAGAAGAACAGCCGG | |
| | GAGCGGATGAAGCGGATCGAGGAGGGCATCAAGGAGCTGGGCAGCCA | |
| | GATCCTGAAGGAGCACCCCGTGGAGAACACCCAGCTGCAGAACGAGAA | |
| | GCTGTACCTGTACTACCTGCAGAACGGCCGGGACATGTACGTGGACCA | |
| | GGAGCTGGACATCAACCGGCTGAGCGACTACGACGTGGACGCCATCGT | |
| | GCCCCAGAGCTTCCTGAAGGACGACAGCATCGACAACAAGGTGCTGAC | |
| | CCGGAGCGACAAGAACCGGGGCAAGAGCGACAACGTGCCCAGCGAGG | |
| | AGGTGGTGAAGAAGATGAAGAACTACTGGCGGCAGCTGCTGAACGCCA | |
| | AGCTGATCACCCAGCGGAAGTTCGACAACCTGACCAAGGCCGAGCGGG | |
| | GCGGCCTGAGCGAGCTGGACAAGGCCGGCTTCATCAAGCGGCAGCTGG | |
| | TGGAGACCCGGCAGATCACCAAGCACGTGGCCCAGATCCTGGACAGCC | |
| | GGATGAACACCAAGTACGACGAGAACGACAAGCTGATCCGGGAGGTGA | |
| | AGGTGATCACCCTGAAGAGCAAGCTGGTGAGCGACTTCCGGAAGGACT | |
| | TCCAGTTCTACAAGGTGCGGGAGATCAACAACTACCACCACGCCCACG | |
| | ACGCCTACCTGAACGCCGTGGTGGGCACCGCCCTGATCAAGAAGTACC | |
| | CCAAGCTGGAGAGCGAGTTCGTGTACGGCGACTACAAGGTGTACGACG | |
| | TGCGGAAGATGATCGCCAAGAGCGAGCAGGAGATCGGCAAGGCCACCG | |
| | CCAAGTACTTCTTCTACAGCAACATCATGAACTTCTTCAAGACCGAGAT | |
| | CACCCTGGCCAACGGCGAGATCCGGAAGCGGCCCCTGATCGAGACCAA | |
| | CGGCGAGACCGGCGAGATCGTGTGGGACAAGGGCCGGGACTTCGCCAC | |
| | CGTGCGGAAGGTGCTGAGCATGCCCCAGGTGAACATCGTGAAGAAGAC | |
| | CGAGGTGCAGACCGGCGGCTTCAGCAAGGAGAGCATCCTGCCCAAGCG | |
| | GAACAGCGACAAGCTGATCGCCCGGAAGAAGGACTGGGACCCCAAGA | |
| | AGTACGGCGGCTTCGACAGCCCCACCGTGGCCTACAGCGTGCTGGTGGT | |
| | GGCCAAGGTGGAGAAGGGCAAGAGCAAGAAGCTGAAGAGCGTGAAGG | |
| | AGCTGCTGGGCATCACCATCATGGAGCGGAGCAGCTTCGAGAAGAACC | |
| | CCATCGACTTCCTGGAGGCCAAGGGCTACAAGGAGGTGAAGAAGGACC | |
| | TGATCATCAAGCTGCCCAAGTACAGCCTGTTCGAGCTGGAGAACGGCC | |
| | GGAAGCGGATGCTGGCCAGCGCCGGCGAGCTGCAGAAGGGCAACGAG | |
| | CTGGCCCTGCCCAGCAAGTACGTGAACTTCCTGTACCTGGCCAGCCACT | |
| | ACGAGAAGCTGAAGGGCAGCCCCGAGGACAACGAGCAGAAGCAGCTG | |
| | TTCGTGGAGCAGCACAAGCACTACCTGGACGAGATCATCGAGCAGATC | |
| | AGCGAGTTCAGCAAGCGGGTGATCCTGGCCGACGCCAACCTGGACAAG | |
| | GTGCTGAGCGCCTACAACAAGCACCGGGACAAGCCCATCCGGGAGCAG | |
| | GCCGAGAACATCATCCACCTGTTCACCCTGACCAACCTGGGCGCCCCCG | |
| | CCGCCTTCAAGTACTTCGACACCACCATCGACCGGAAGCGGTACACCAG | |
| | CACCAAGGAGGTGCTGGACGCCACCCTGATCCACCAGAGCATCACCGG | |
| | CCTGTACGAGACCCGGATCGACCTGAGCCAGCTGGGCGGCGACAGCGG | |
| | CGGCAAGCGGCCCGCCGCCACCAAGAAGGCCGGCCAGGCCAAGAAGA | |
| | AGAAGGctagCgatgctaagtcactgactgcctggtcccggacactggtgaccttcaaggatgtgtt | |
| | tgtggacttcaccagggaggagtggaagctgctggacactgctcagcagatcctgtacagaaatgtg | |
| | atgctggagaactataagaacctggtttccttgggttatcagcttactaagccagatgtgatcctcc | |
| | ggttggagaagggagaagagccctggctggtggagagagaaattcaccaagagacccatcctgattca | |
| | gagactgcatttgaaatcaaatcatcagttCCGAAAAAGAAACGCAAAGTTTAG | |
| 649 | SNHDQEFDPPKVYPPVPAEKRKPIRVLSLFDGIATGLLVLKDLGIQVDRYIA | DNMT3A/L(CRIS |
| | SEVCEDSITVGMVRHQGKIMYVGDVRSVTQKHIQEWGPFDLVIGGSPCND | PROFF)-XTEN80- |
| | LSIVNPARKGLYEGTGRLFFEFYRLLHDARPKEGDDRPFFWLFENVVAMG | dSpCas9-KRAB |
| | VSDKRDISRFLESNPVMIDAKEVSAAHRARYFWGNLPGMNRPLASTVNDK | (AA) |
| | LELQECLEHGRIAKFSKVRTITTRSNSIKQGKDQHFPVFMNEKEDILWCTEM | |
| | ERVFGFPVHYTDVSNMSRLARQRLLGRSWSVPVIRHLFAPLKEYFACVSSG | |
| | NSNANSRGPSFSSGLVPLSLRGSHMGPMEIYKTVSAWKRQPVRVLSLFRNI | |
| | DKVLKSLGFLESGSGSGGGTLKYVEDVTNVVRRDVEKWGPFDLVYGSTQP | |
| | LGSSCDRCPGWYMFQFHRILQYALPRQESQRPFFWIFMDNLLLTEDDQETT | |
| | TRFLQTEAVTLQDVRGRDYQNAMRVWSNIPGLKSKHAPLTPKEEEYLQAQ | |
| | VRSRSKLDAPKVDLLVKNCLLPLREYFKYFSQNSLPLGGPSSGAPPPSGGSP | |
| | AGSPTSTEEGTSESATPESGPGTSTEPSEGSAPGSPAGSPTSTEEGTSTEPSEG | |
| | SAPGTSTEPSEVNPKKKRKVGIHGVPAADKKYSIGLAIGTNSVGWAVITDE | |
| | YKVPSKKFKVLGNTDRHSIKKNLIGALLFDSGETAEATRLKRTARRRYTRR | |
| | KNRICYLQEIFSNEMAKVDDSFFHRLEESFLVEEDKKHERHPIFGNIVDEVA | |
| | YHEKYPTIYHLRKKLVDSTDKADLRLIYLALAHMIKFRGHFLIEGDLNPDN | |
| | SDVDKLFIQLVQTYNQLFEENPINASGVDAKAILSARLSKSRRLENLIAQLP | |
| | GEKKNGLFGNLIALSLGLTPNFKSNFDLAEDAKLQLSKDTYDDDLDNLLA | |
| | QIGDQYADLFLAAKNLSDAILLSDILRVNTEITKAPLSASMIKRYDEHHQDL | |
| | TLLKALVRQQLPEKYKEIFFDQSKNGYAGYIDGGASQEEFYKFIKPILEKMD | |
| | GTEELLVKLNREDLLRKQRTFDNGSIPHQIHLGELHAILRRQEDFYPFLKDN | |
| | REKIEKILTFRIPYYVGPLARGNSRFAWMTRKSEETITPWNFEEVVDKGASA | |
| | QSFIERMTNFDKNLPNEKVLPKHSLLYEYFTVYNELTKVKYVTEGMRKPA | |
| | FLSGEQKKAIVDLLFKTNRKVTVKQLKEDYFKKIECFDSVEISGVEDRENAS | |
| | LGTYHDLLKIIKDKDFLDNEENEDILEDIVLTLTLFEDREMIEERLKTYAHLF | |
| | DDKVMKQLKRRRYTGWGRLSRKLINGIRDKQSGKTILDFLKSDGFANRNF | |
| | MQLIHDDSLTFKEDIQKAQVSGQGDSLHEHIANLAGSPAIKKGILQTVKVV | |
| | DELVKVMGRHKPENIVIEMARENQTTQKGQKNSRERMKRIEEGIKELGSQI | |
| | LKEHPVENTQLQNEKLYLYYLQNGRDMYVDQELDINRLSDYDVDAIVPQS | |
| | FLKDDSIDNKVLTRSDKNRGKSDNVPSEEVVKKMKNYWRQLLNAKLITQR | |
| | KFDNLTKAERGGLSELDKAGFIKRQLVETRQITKHVAQILDSRMNTKYDEN | |
| | DKLIREVKVITLKSKLVSDFRKDFQFYKVREINNYHHAHDAYLNAVVGTA | |
| | LIKKYPKLESEFVYGDYKVYDVRKMIAKSEQEIGKATAKYFFYSNIMNFFK | |
| | TEITLANGEIRKRPLIETNGETGEIVWDKGRDFATVRKVLSMPQVNIVKKTE | |
| | VQTGGFSKESILPKRNSDKLIARKKDWDPKKYGGFDSPTVAYSVLVVAKV | |
| | EKGKSKKLKSVKELLGITIMERSSFEKNPIDFLEAKGYKEVKKDLIIKLPKYS | |
| | LFELENGRKRMLASAGELQKGNELALPSKYVNFLYLASHYEKLKGSPEDN | |
| | EQKQLFVEQHKHYLDEIIEQISEFSKRVILADANLDKVLSAYNKHRDKPIRE | |
| | QAENIIHLFTLTNLGAPAAFKYFDTTIDRKRYTSTKEVLDATLIHQSITGLYE | |
| | TRIDLSQLGGDSGGKRPAATKKAGQAKKKKASDAKSLTAWSRTLVTFKD | |
| | VFVDFTREEWKLLDTAQQILYRNVMLENYKNLVSLGYQLTKPDVILRLEK | |
| | GEEPWLVEREIHQETHPDSETAFEIKSSVPKKKRKV | |
| 650 | aattccacaacctttcaccaaactctgcaagatcccagagtgagaggcctgtatt | Hepatitis |
| | tccct | B Virus |
| | gctggtggctccagttcaggagcagtaaaccctgttccgactactgcctctccct | genome |
| | tatcg | (Hepatitis B |
| | tcaatcttctcgaggattggggaccctgcgctgaacatggagaacatcacatcag | virus subtype |
| | gattc | ayw, complete |
| | ctaggaccccttctcgtgttacaggcggggtttttcttgttgacaagaatcctca | genome, GenBank: |
| | caata | U95551.1), |
| | ccgcagagtctagactcgtggtggacttctctcaattttctagggggaactaccg | |
| | tgtgt | |
| | cttggccaaaattcgcagtccccaacctccaatcactcaccaacctcctgtcctc | |
| | caact | |
| | tgtcctggttatcgctggatgtgtctgcggcgttttatcatcttcctcttcatcc | |
| | tgctg | |
| | ctatgcctcatcttcttgttggttcttctggactatcaaggtatgttgcccgttt | |
| | gtcct | |
| | ctaattccaggatcctcaaccaccagcacgggaccatgccgaacctgcatgacta | |
| | ctgct | |
| | caaggaacctctatgtatccctcctgttgctgtaccaaaccttcggacggaaatt | |
| | gcacc | |
| | tgtattcccatcccatcatcctgggctttcggaaaattcctatgggagtgggcct | |
| | cagcc | |
| | cgtttctcctggctcagtttactagtgccatttgttcagtggttcgtagggcttt | |
| | CCCCC | |
| | actgtttggctttcagttatatggatgatgtggtattgggggccaagtctgtaca | |
| | gcatc | |
| | ttgagtccctttttaccgctgttaccaattttcttttgtctttgggtatacattt | |
| | aaacc | |
| | ctaacaaaacaaagagatggggttactctctgaattttatgggttatgtcattgg | |
| | aagtt | |
| | atgggtccttgccacaagaacacatcatacaaaaaatcaaagaatgttttagaaa | |
| | acttc | |
| | ctattaacaggcctattgattggaaagtatgtcaacgaattgtgggtcttttggg | |
| | ttttg | |
| | ctgccccatttacacaatgtggttatcctgcgttaatgcccttgtatgcatgtat | |
| | tcaat | |
| | ctaagcaggctttcactttctcgccaacttacaaggcctttctgtgtaaacaata | |
| | cctga | |
| | acctttaccccgttgcccggcaacggccaggtctgtgccaagtgtttgctgacgc | |
| | aaccc | |
| | ccactggctggggcttggtcatgggccatcagcgcgtgcgtggaaccttttcggc | |
| | tcctc | |
| | tgccgatccatactgcggaactcctagccgcttgttttgctcgcagcaggtctgg | |
| | agcaa | |
| | acattatcgggactgataactctgttgtcctctcccgcaaatatacatcgtatcc | |
| | atggc | |
| | tgctaggctgtgctgccaactggatcctgcgcgggacgtcctttgtttacgtccc | |
| | gtcgg | |
| | cgctgaatcctgcggacgacccttctcggggtcgcttgggactctctcgtcccct | |
| | tctcc | |
| | gtctgccgttccgaccgaccacggggcgcacctctctttacgcggactccccgtc | |
| | tgtgc | |
| | cttctcatctgccggaccgtgtgcacttcgcttcacctctgcacgtcgcatggag | |
| | accac | |
| | cgtgaacgcccaccgaatgttgcccaaggtcttacataagaggactcttggactc | |
| | tctgc | |
| | aatgtcaacgaccgaccttgaggcatacttcaaagactgtttgtttaaagactgg | |
| | gagga | |
| | gttgggggaggagattagattaaaggtctttgtactaggaggctgtaggcataaa | |
| | ttggt | |
| | ctgcgcaccagcaccatgcaactttttcacctctgcctaatcatctcttgttcat | |
| | gtcct | |
| | actgttcaagcctccaagctgtgccttgggtggctttggggcatggacatcgacc | |
| | cttat | |
| | aaagaatttggagctactgtggagttactctcgtttttgccttctgacttctttc | |
| | cttca | |
| | gtacgagatcttctagataccgcctcagctctgtatcgggaagccttagagtctc | |
| | ctgag | |
| | cattgttcacctcaccatactgcactcaggcaagcaattctttgctggggggaac | |
| | taatg | |
| | actctagctacctgggtgggtgttaatttggaagatccagcatctagagacctag | |
| | tagtc | |
| | agttatgtcaacactaatatgggcctaaagttcaggcaactcttgtggtttcaca | |
| | tttct | |
| | tgtctcacttttggaagagaaaccgttatagagtatttggtgtctttcggagtgt | |
| | ggatt | |
| | cgcactcctccagcttatagaccaccaaatgcccctatcctatcaacacttccgg | |
| | aaact | |
| | actgttgttagacgacgaggcaggtcccctagaagaagaactccctcgcctcgca | |
| | gacga | |
| | aggtctcaatcgccgcgtcgcagaagatctcaatctcgggaacctcaatgttagt | |
| | attcc | |
| | ttggactcataaggtggggaactttactggtctttattcttctactgtacctgtc | |
| | tttaa | |
| | tcctcattggaaaacaccatcttttcctaatatacatttacaccaagacattatc | |
| | aaaaa | |
| | atgtgaacagtttgtaggcccacttacagttaatgagaaaagaagattgcaattg | |
| | attat | |
| | gcctgctaggttttatccaaaggttaccaaatatttaccattggataagggtatt | |
| | aaacc | |
| | ttattatccagaacatctagttaatcattacttccaaactagacactatttacac | |
| | actct | |
| | atggaaggcgggtatattatataagagagaaacaacacatagcgcctcattttgt | |
| | gggtc | |
| | accatattcttgggaacaagatctacagcatggggcagaatctttccaccagcaa | |
| | tcctc | |
| | tgggattctttcccgaccaccagttggatccagccttcagagcaaacacagcaaa | |
| | tccag | |
| | attgggacttcaatcccaacaaggacacctggccagacgccaacaaggtaggagc | |
| | tggag | |
| | cattcgggctgggtttcaccccaccgcacggaggccttttggggtggagccctca | |
| | ggctc | |
| | agggcatactacaaactttgccagcaaatccgcctcctgcctccaccaatcgcca | |
| | gacag | |
| | gaaggcagcctaccccgctgtctccacctttgagaaacactcatcctcaggccat | |
| | gcagt | |
| | gg | |
| 651 | NHDQEFDPPKVYPPVPAEKRKPIRVLSLFDGIATGLLVLKDLGIQVDRYIAS | DNMT3A/L (AA) |
| | EVCEDSITVGMVRHQGKIMYVGDVRSVTQKHIQEWGPFDLVIGGSPCNDL | |
| | SIVNPARKGLYEGTGRLFFEFYRLLHDARPKEGDDRPFFWLFENVVAMGV | |
| | SDKRDISRFLESNPVMIDAKEVSAAHRARYFWGNLPGMNRPLASTVNDKL | |
| | ELQECLEHGRIAKFSKVRTITTRSNSIKQGKDQHFPVFMNEKEDILWCTEME | |
| | RVFGFPVHYTDVSNMSRLARQRLLGRSWSVPVIRHLFAPLKEYFACVSSGN | |
| | SNANSRGPSFSSGLVPLSLRGSHMGPMEIYKTVSAWKRQPVRVLSLFRNID | |
| | KVLKSLGFLESGSGSGGGTLKYVEDVTNVVRRDVEKWGPFDLVYGSTQPL | |
| | GSSCDRCPGWYMFQFHRILQYALPRQESQRPFFWIFMDNLLLTEDDQETTT | |
| | RFLQTEAVTLQDVRGRDYQNAMRVWSNIPGLKSKHAPLTPKEEEYLQAQV | |
| | RSRSKLDAPKVDLLVKNCLLPLREYFKYFSQNSLPL | |
| 652 | TGCCTGTCCTACGAGACAGAGATCCTGACAGTGGAGTATGGCCTGCTGC | N term Npu |
| | CAATCGGCAAGATCGTGGAGAAGAGGATCGAGTGTACCGTGTACTCTG | Intein (nt) |
| | TGGATAACAATGGCAACATCTATACACAGCCCGTGGCACAGTGGCACG | |
| | ATAGGGGAGAGCAGGAGGTGTTCGAGTATTGCCTGGAGGACGGCAGCC | |
| | TGATCAGGGCAACCAAGGACCACAAGTTCATGACAGTGGATGGCCAGA | |
| | TGCTGCCCATCGAC | |
| 653 | CLSYETEILTVEYGLLPIGKIVEKRIECTVYSVDNNGNIYTQPVAQWHDRGE | N term Npu |
| | QEVFEYCLEDGSLIRATKDHKFMTVDGQMLPID | Intein (aa) |
| 654 | ATCAAGATTGCTACACGGAAATACCTGGGAAAGCAGAACGTGTACGAC | C term Npu |
| | ATCGGCGTGGAGCGGGATCACAACTTCGCCCTGAAGAATGGCTTTATCG | Intein (nt) |
| | CCAGCAAT | |
| 655 | IKIATRKYLGKQNVYDIGVERDHNFALKNGFIASN | C term Npu |
| | | Intein (aa) |
| 656 | ATGAAACGGACAGCCGACGGAAGCGAGTTCGAGTCACCAAAGAAGAA | dSpCas9-573-C |
| | GCGGAAAGTCATCAAGATTGCTACACGGAAATACCTGGGAAAGCAGAA | Intein (nt) |
| | CGTGTACGACATCGGCGTGGAGCGGGATCACAACTTCGCCCTGAAGAA | |
| | TGGCTTTATCGCCAGCAATTGTTTCGACTCTGTTGAAATCAGCGGAGTG | |
| | GAGGATCGCTTCAACGCATCCCTGGGAACGTATCACGATCTCCTGAAAA | |
| | TCATTAAAGACAAGGACTTCCTGGACAATGAGGAGAACGAGGACATTC | |
| | TTGAGGACATTGTCCTCACCCTTACGTTGTTTGAAGATAGGGAGATGAT | |
| | TGAAGAACGCTTGAAAACTTACGCTCATCTCTTCGACGACAAAGTCATG | |
| | AAACAGCTCAAGAGGCGCCGATATACAGGATGGGGGCGGCTGTCAAGA | |
| | AAACTGATCAATGGgatcCGAGACAAGCAGAGTGGAAAGACAATCCTGG | |
| | ATTTTCTTAAGTCCGATGGATTTGCCAACCGGAACTTCATGCAGTTGAT | |
| | CCATGATGACTCTCTCACCTTTAAGGAGGACATCCAGAAAGCACAAGTT | |
| | TCTGGCCAGGGGGACAGTCTTCACGAGCACATCGCTAATCTTGCAGGTA | |
| | GCCCAGCTATCAAAAAGGGAATACTGCAGACCGTTAAGGTCGTGGATG | |
| | AACTCGTCAAAGTAATGGGAAGGCATAAGCCCGAGAATATCGTTATCG | |
| | AGATGGCCCGAGAGAACCAAACTACCCAGAAGGGACAGAAGAACAGT | |
| | AGGGAAAGGATGAAGAGGATTGAAGAGGGTATAAAAGAACTGGGGTC | |
| | CCAAATCCTTAAGGAACACCCAGTTGAAAACACCCAGCTTCAGAATGA | |
| | GAAGCTCTACCTGTACTACCTGCAGAACGGCAGGGACATGTACGTGGA | |
| | TCAGGAACTGGACATCAATCGGCTCTCCGACTACGACGTGGATGCCATC | |
| | GTGCCCCAGTCTTTTCTCAAAGATGATTCTATTGATAATAAAGTGTTGA | |
| | CAAGATCCGATAAAAATAGAGGGAAGAGTGATAACGTCCCCTCAGAAG | |
| | AAGTTGTCAAGAAAATGAAAAATTATTGGCGGCAGCTGCTGAACGCCA | |
| | AACTGATCACACAACGGAAGTTCGATAATCTGACTAAGGCTGAACGAG | |
| | GTGGCCTGTCTGAGTTGGATAAAGCCGGCTTCATCAAAAGGCAGCTTGT | |
| | TGAGACACGCCAGATCACCAAgcacGTGGCCCAAATTCTCGATTCACGCA | |
| | TGAACACCAAGTACGATGAAAATGACAAACTGATTCGAGAGGTGAAAG | |
| | TTATTACTCTGAAGTCTAAGCTGGTCTCAGATTTCAGAAAGGACTTTCA | |
| | GTTTTATAAGGTGAGAGAGATCAACAATTACCACCATGCGCATGATGCC | |
| | TACCTGAATGCAGTGGTAGGCACTGCACTTATCAAAAAATATCCCAAGC | |
| | TTGAATCTGAATTTGTTTACGGAGACTATAAAGTGTACGATGTTAGGAA | |
| | AATGATCGCAAAGTCTGAGCAGGAAATAGGCAAGGCCACCGCTAAGTA | |
| | CTTCTTTTACAGCAATATTATGAATTTTTTCAAGACCGAGATTACACTGG | |
| | CCAATGGAGAGATTCGGAAGCGACCACTTATCGAAACAAACGGAGAAA | |
| | CAGGAGAAATCGTGTGGGACAAGGGTAGGGATTTCGCGACAGTCCGGA | |
| | AGGTCCTGTCCATGCCGCAGGTGAACATCGTTAAAAAGACCGAAGTAC | |
| | AGACCGGAGGCTTCTCCAAGGAAAGTATCCTCCCGAAAAGGAACAGCG | |
| | ACAAGCTGATCGCACGCAAAAAAGATTGGGACCCCAAGAAATACGGCG | |
| | GATTCGATTCTCCTACAGTCGCTTACAGTGTACTGGTTGTGGCCAAAGT | |
| | GGAGAAAGGGAAGTCTAAAAAACTCAAAAGCGTCAAGGAACTGCTGG | |
| | GCATCACAATCATGGAGCGATCAAGCTTCGAAAAAAACCCCATCGACT | |
| | TTCTCGAGGCGAAAGGATATAAAGAGGTCAAAAAAGACCTCATCATTA | |
| | AGCTTCCCAAGTACTCTCTCTTTGAGCTTGAAAACGGCCGGAAACGAAT | |
| | GCTCGCTAGTGCGGGCGAGCTGCAGAAAGGTAACGAGCTGGCACTGCC | |
| | CTCTAAATACGTTAATTTCTTGTATCTGGCCAGCCACTATGAAAAGCTC | |
| | AAAGGGTCTCCCGAAGATAATGAGCAGAAGCAGCTGTTCGTGGAACAA | |
| | CACAAACACTACCTTGATGAGATCATCGAGCAAATAAGCGAATTCTCCA | |
| | AAAGAGTGATCCTCGCCGACGCTAACCTCGATAAGGTGCTTTCTGCTTA | |
| | CAATAAGCACAGGGATAAGCCCATCAGGGAGCAGGCAGAAAACATTAT | |
| | CCACTTGTTTACTCTGACCAACTTGGGCGCGCCTGCAGCCTTCAAGTAC | |
| | TTCGACACCACCATAGACAGAAAGCGGTACACCTCTACAAAGGAGGTC | |
| | CTGGACGCCACACTGATTCATCAGTCAATTACGGGGCTCTATGAAACAA | |
| | GAATCGACCTCTCTCAGCTCGGTGGAGACAAAAGGCCGGCGGCCACGA | |
| | AAAAGGCCGGCCAGGCAAAAAAGAAAAAGTGA | |
| 657 | MKRTADGSEFESPKKKRKVIKIATRKYLGKQNVYDIGVERDHNFALKNGFI | dSpCas9-573-C |
| | ASNCFDSVEISGVEDRFNASLGTYHDLLKIIKDKDFLDNEENEDILEDIVLTL | Intein (aa) |
| | TLFEDREMIEERLKTYAHLFDDKVMKQLKRRRYTGWGRLSRKLINGIRDK | |
| | QSGKTILDFLKSDGFANRNFMQLIHDDSLTFKEDIQKAQVSGQGDSLHEHI | |
| | ANLAGSPAIKKGILQTVKVVDELVKVMGRHKPENIVIEMARENQTTQKGQ | |
| | KNSRERMKRIEEGIKELGSQILKEHPVENTQLQNEKLYLYYLQNGRDMYV | |
| | DQELDINRLSDYDVDAIVPQSFLKDDSIDNKVLTRSDKNRGKSDNVPSEEV | |
| | VKKMKNYWRQLLNAKLITQRKFDNLTKAERGGLSELDKAGFIKRQLVETR | |
| | QITKHVAQILDSRMNTKYDENDKLIREVKVITLKSKLVSDFRKDFQFYKVR | |
| | EINNYHHAHDAYLNAVVGTALIKKYPKLESEFVYGDYKVYDVRKMIAKSE | |
| | QEIGKATAKYFFYSNIMNFFKTEITLANGEIRKRPLIETNGETGEIVWDKGR | |
| | DFATVRKVLSMPQVNIVKKTEVQTGGFSKESILPKRNSDKLIARKKDWDPK | |
| | KYGGFDSPTVAYSVLVVAKVEKGKSKKLKSVKELLGITIMERSSFEKNPIDF | |
| | LEAKGYKEVKKDLIIKLPKYSLFELENGRKRMLASAGELQKGNELALPSKY | |
| | VNFLYLASHYEKLKGSPEDNEQKQLFVEQHKHYLDEIIEQISEFSKRVILAD | |
| | ANLDKVLSAYNKHRDKPIREQAENIIHLFTLTNLGAPAAFKYFDTTIDRKRY | |
| | TSTKEVLDATLIHQSITGLYETRIDLSQLGGDKRPAATKKAGQAKKKK | |
| 658 | SGSETPGTSESATPES | Linker (aa) |
| 659 | ATGGCGGCCATCCCAGCCCTGGACCCAGAGGCCGAGCCCAGCATGGAC | DNMT3L (nt) |
| | GTGATTTTGGTGGGATCCAGTGAGCTCTCAAGCTCCGTTTCACCCGGGA | |
| | CAGGCAGAGATCTTATTGCATATGAAGTCAAGGCTAACCAGCGAAATA | |
| | TAGAAGACATCTGCATCTGCTGCGGAAGTCTCCAGGTTCACACACAGCA | |
| | CCCTCTGTTTGAGGGAGGGATCTGCGCCCCATGTAAGGACAAGTTCCTG | |
| | GATGCCCTCTTCCTGTACGACGATGACGGGTACCAATCCTACTGCTCCA | |
| | TCTGCTGCTCCGGAGAAACGCTGCTCATCTGCGGAAACCCTGATTGCAC | |
| | CCGATGCTACTGCTTCGAGTGTGTGGATAGCCTGGTCGGCCCCGGGACC | |
| | TCGGGGAAGGTGCACGCCATGAGCAACTGGGTGTGCTACCTGTGCCTGC | |
| | CGTCCTCCCGAAGCGGGCTGCTGCAGCGTCGGAGGAAGTGGCGCAGCC | |
| | AGCTCAAGGCCTTCTACGACCGAGAGTCGGAGAATCCCCTTGAGATGTT | |
| | CGAAACCGTGCCTGTGTGGAGGAGACAGCCAGTCCGGGTGCTGTCCCTT | |
| | TTTGAAGACATCAAGAAAGAGCTGACGAGTTTGGGCTTTTTGGAAAGTG | |
| | GTTCTGACCCGGGACAACTGAAGCATGTGGTTGATGTCACAGACACAGT | |
| | GAGGAAGGATGTGGAGGAGTGGGGACCCTTCGATCTTGTGTACGGCGC | |
| | CACACCTCCCCTGGGCCACACCTGTGACCGTCCTCCCAGCTGGTACCTG | |
| | TTCCAGTTCCACCGGCTCCTGCAGTACGCACGGCCCAAGCCAGGCAGCC | |
| | CCAGGCCCTTCTTCTGGATGTTCGTGGACAATCTGGTGCTGAACAAGGA | |
| | AGACCTGGACGTCGCATCTCGCTTCCTGGAGATGGAGCCAGTCACCATC | |
| | CCAGATGTCCACGGCGGATCCTTGCAGAATGCTGTCCGCGTGTGGAGCA | |
| | ACATCCCAGCCATAAGGAGCAGGCACTGGGCTCTGGTTTCGGAAGAAG | |
| | AATTGTCCCTGCTGGCCCAGAACAAGCAGAGCTCGAAGCTCGCGGCCA | |
| | AGTGGCCCACCAAGCTGGTGAAGAACTGCTTTCTCCCCCTAAGAGAATA | |
| | TTTCAAGTATTTTTCAACAGAACTCACTTCCTCTTTA | |
| 660 | ACCTACGGGCTGCTGCGGCGGCGAGAGGACTGGCCCTCCCGGCTCCAG | DNMT3A (nt) |
| | ATGTTCTTCGCTAATAACCACGACCAGGAATTTGACCCTCCAAAGGTTT | |
| | ACCCACCTGTCCCAGCTGAGAAGAGGAAGCCCATCCGGGTGCTGTCTCT | |
| | CTTTGATGGAATCGCTACAGGGCTCCTGGTGCTGAAGGACTTGGGCATT | |
| | CAGGTGGACCGCTACATTGCCTCGGAGGTGTGTGAGGACTCCATCACGG | |
| | TGGGCATGGTGCGGCACCAGGGGAAGATCATGTACGTCGGGGACGTCC | |
| | GCAGCGTCACACAGAAGCATATCCAGGAGTGGGGCCCATTCGATCTGG | |
| | TGATTGGGGGCAGTCCCTGCAATGACCTCTCCATCGTCAACCCTGCTCG | |
| | CAAGGGCCTCTACGAGGGCACTGGCCGGCTCTTCTTTGAGTTCTACCGC | |
| | CTCCTGCATGATGCGCGGCCCAAGGAGGGAGATGATCGCCCCTTCTTCT | |
| | GGCTCTTTGAGAATGTGGTGGCCATGGGCGTTAGTGACAAGAGGGACA | |
| | TCTCGCGATTTCTCGAGTCCAACCCTGTGATGATTGATGCCAAAGAAGT | |
| | GTCAGCTGCACACAGGGCCCGCTACTTCTGGGGTAACCTTCCCGGTATG | |
| | AACAGGCCGTTGGCATCCACTGTGAATGATAAGCTGGAGCTGCAGGAG | |
| | TGTCTGGAGCATGGCAGGATAGCCAAGTTCAGCAAAGTGAGGACCATT | |
| | ACTACGAGGTCAAACTCCATAAAGCAGGGCAAAGACCAGCATTTTCCT | |
| | GTCTTCATGAATGAGAAAGAGGACATCTTATGGTGCACTGAAATGGAA | |
| | AGGGTATTTGGTTTCCCAGTCCACTATACTGACGTATCCAACATGAGCC | |
| | GCTTGGCGAGGCAGAGACTGCTGGGCCGGTCATGGAGCGTGCCAGTCA | |
| | TCCGCCACCTCTTCGCTCCGCTGAAGGAGTATTTTGCGTGTGTG | |
| 661 | TYGLLRRREDWPSRLQMFFANNHDQEFDPPKVYPPVPAEKRKPIRVLSLFD | DNMT3A (AA) |
| | GIATGLLVLKDLGIQVDRYIASEVCEDSITVGMVRHQGKIMYVGDVRSVTQ | |
| | KHIQEWGPFDLVIGGSPCNDLSIVNPARKGLYEGTGRLFFEFYRLLHDARPK | |
| | EGDDRPFFWLFENVVAMGVSDKRDISRFLESNPVMIDAKEVSAAHRARYF | |
| | WGNLPGMNRPLASTVNDKLELQECLEHGRIAKFSKVRTITTRSNSIKQGKD | |
| | QHFPVFMNEKEDILWCTEMERVFGFPVHYTDVSNMSRLARQRLLGRSWSV | |
| | PVIRHLFAPLKEYFACV | |
| 662 | AACCATGACCAGGAATTTGACCCCCCAAAGGTTTACCCACCTGTGCCAG | DNMT3A/L v1 |
| | CTGAGAAGAGGAAGCCCATCCGCGTGCTGTCTCTCTTTGATGGGATTGC | (nt) |
| | TACAGGGCTCCTGGTGCTGAAGGACCTGGGCATCCAAGTGGACCGCTA | |
| | CATTGCCTCCGAGGTGTGTGAGGACTCCATCACGGTGGGCATGGTGCGG | |
| | CACCAGGGAAAGATCATGTACGTCGGGGACGTCCGCAGCGTCACACAG | |
| | AAGCATATCCAGGAGTGGGGCCCATTCGACCTGGTGATTGGAGGCAGT | |
| | CCCTGCAATGACCTCTCCATTGTCAACCCTGCCCGCAAGGGACTTTATG | |
| | AGGGTACTGGCCGCCTCTTCTTTGAGTTCTACCGCCTCCTGCATGATGCG | |
| | CGGCCCAAGGAGGGAGATGATCGCCCCTTCTTCTGGCTCTTTGAGAATG | |
| | TGGTGGCCATGGGCGTTAGTGACAAGAGGGACATCTCGCGATTTCTTGA | |
| | GTCTAACCCCGTGATGATTGACGCCAAAGAAGTGTCTGCTGCACACAGG | |
| | GCCCGTTACTTCTGGGGTAACCTTCCTGGCATGAACAGGCCTTTGGCAT | |
| | CCACTGTGAATGATAAGCTGGAGCTGCAAGAGTGTCTGGAGCACGGCA | |
| | GAATAGCCAAGTTCAGCAAAGTGAGGACCATTACCACCAGGTCAAACT | |
| | CTATAAAGCAGGGCAAAGACCAGCATTTCCCCGTCTTCATGAACGAGA | |
| | AGGAGGACATCCTGTGGTGCACTGAAATGGAAAGGGTGTTTGGCTTCCC | |
| | CGTCCACTACACAGACGTCTCCAACATGAGCCGCTTGGCGAGGCAGAG | |
| | ACTGCTGGGCCGATCGTGGAGCGTGCCGGTCATCCGCCACCTCTTCGCT | |
| | CCGCTGAAGGAATATTTTGCTTGTGTGTCTAGCGGCAATAGTAACGCTA | |
| | ACAGCCGCGGGCCGAGCTTCAGCAGCGGCCTGGTGCCGTTAAGCTTGC | |
| | GCGGCAGCCATATGGGCCCTATGGAGATATACAAGACAGTGTCTGCAT | |
| | GGAAGAGACAGCCAGTGCGGGTACTGAGCCTCTTCAGAAACATCGACA | |
| | AGGTACTAAAGAGTTTGGGCTTCTTGGAAAGCGGTTCTGGTTCTGGGGG | |
| | AGGAACGCTGAAGTACGTGGAAGATGTCACAAATGTCGTGAGGAGAGA | |
| | CGTGGAGAAATGGGGCCCCTTTGACCTGGTGTACGGCTCGACGCAGCCC | |
| | CTAGGCAGCTCTTGTGATCGCTGTCCCGGCTGGTACATGTTCCAGTTCC | |
| | ACCGGATCCTGCAGTATGCGCTGCCTCGCCAGGAGAGTCAGCGGCCCTT | |
| | CTTCTGGATATTCATGGACAATCTGCTGCTGACTGAGGATGACCAAGAG | |
| | ACAACTACCCGCTTCCTTCAGACAGAGGCTGTGACCCTCCAGGATGTCC | |
| | GTGGCAGAGACTACCAGAATGCTATGCGGGTGTGGAGCAACATTCCAG | |
| | GGCTGAAGAGCAAGCATGCGCCCCTGACCCCAAAGGAAGAAGAGTATC | |
| | TGCAAGCCCAAGTCAGAAGCAGGAGCAAGCTGGACGCCCCGAAAGTTG | |
| | ACCTCCTGGTGAAGAACTGCCTTCTCCCGCTGAGAGAGTACTTCAAGTA | |
| | TTTTTCTCAAAACTCACTTCCTCTT | |
| 663 | AACCACGATCAGGAGTTTGACCCCCCTAAGGTGTACCCACCCGTGCCAG | DNMT3A/L v2 |
| | CCGAGAAGAGGAAGCCCATCCGCGTGCTGTCCCTGTTCGACGGCATCGC | (nt) |
| | CACAGGCCTGCTGGTGCTGAAGGATCTGGGCATCCAGGTGGACAGATA | |
| | TATCGCCTCCGAGGTGTGCGAGGATTCTATCACCGTGGGCATGGTGAGG | |
| | CACCAGGGCAAGATCATGTACGTGGGCGACGTGCGCAGCGTGACACAG | |
| | AAGCACATCCAGGAGTGGGGACCCTTCGACCTGGTCATCGGAGGCAGC | |
| | CCCTGTAATGACCTGTCCATCGTGAACCCTGCAAGGAAGGGCCTGTATG | |
| | AGGGAACCGGCAGACTGTTCTTTGAGTTCTACAGGCTGCTGCACGACGC | |
| | CCGCCCTAAGGAGGGCGATGACAGGCCATTCTTTTGGCTGTTTGAGAAC | |
| | GTGGTGGCCATGGGCGTGAGCGACAAGCGGGATATCTCCAGATTCCTG | |
| | GAGTCTAATCCCGTGATGATCGATGCAAAGGAGGTGTCTGCCGCACAC | |
| | AGGGCAAGGTACTTTTGGGGAAATCTGCCTGGCATGAACCGCCCACTG | |
| | GCCAGCACCGTGAACGACAAGCTGGAGCTGCAGGAGTGCCTGGAGCAC | |
| | GGAAGGATCGCCAAGTTCTCCAAGGTGCGGACAATCACCACAAGATCT | |
| | AACAGCATCAAGCAGGGCAAGGATCAGCACTTCCCCGTGTTCATGAAT | |
| | GAGAAGGAGGACATCCTGTGGTGTACCGAGATGGAGCGCGTGTTCGGC | |
| | TTTCCAGTGCACTATACAGACGTGAGCAATATGAGCCGGCTGGCAAGG | |
| | CAGAGACTGCTGGGCCGGTCCTGGTCTGTGCCAGTGATCAGACACCTGT | |
| | TCGCCCCCCTGAAGGAGTACTTTGCCTGCGTGTCTAGCGGCAACTCTAA | |
| | TGCCAACAGCAGAGGCCCTTCCTTTTCCTCTGGCCTGGTGCCACTGTCTC | |
| | TGAGGGGCAGCCACATGGGCCCCATGGAGATCTACAAGACCGTGTCCG | |
| | CCTGGAAGAGGCAGCCTGTGCGCGTGCTGTCTCTGTTCCGCAACATCGA | |
| | CAAGGTGCTGAAGAGCCTGGGCTTTCTGGAGAGCGGATCCGGATCTGG | |
| | AGGAGGCACCCTGAAGTATGTGGAGGATGTGACAAATGTGGTGCGGAG | |
| | AGATGTGGAGAAGTGGGGCCCCTTCGATCTGGTGTACGGATCCACCCA | |
| | GCCACTGGGAAGCTCCTGCGATAGGTGTCCAGGATGGTATATGTTCCAG | |
| | TTTCACAGAATCCTGCAGTACGCACTGCCAAGGCAGGAGAGCCAGCGC | |
| | CCTTTCTTTTGGATCTTTATGGACAACCTGCTGCTGACAGAGGATGACC | |
| | AGGAGACAACAACCCGCTTCCTGCAGACAGAGGCAGTGACCCTGCAGG | |
| | ATGTGAGGGGACGCGACTATCAGAATGCCATGCGGGTGTGGTCTAACA | |
| | TCCCTGGCCTGAAGAGCAAGCACGCCCCCCTGACCCCTAAGGAGGAGG | |
| | AGTACCTGCAGGCCCAGGTGCGGAGCAGATCCAAGCTGGATGCCCCTA | |
| | AGGTGGACCTGCTGGTGAAGAATTGTCTGCTGCCACTGCGGGAGTACTT | |
| | CAAGTACTTTAGTCAGAATAGCCTGCCACTG | |
| 664 | MGPMEIYKTVSAWKRQPVRVLSLFRNIDKVLKSLGFLESGSGSGGGTLKY | Murine DNMT3L |
| | VEDVTNVVRRDVEKWGPFDLVYGSTQPLGSSCDRCPGWYMFQFHRILQY | |
| | ALPRQESQRPFFWIFMDNLLLTEDDQETTTRFLQTEAVTLQDVRGRDYQN | |
| | AMRVWSNIPGLKSKHAPLTPKEEEYLQAQVRSRSKLDAPKVDLLVKNCLL | |
| | PLREYFKYFSQNSLPL | |
| 665 | NHDQEFDPPKVYPPVPAEKRKPIRVLSLFDGIATGLLVLKDLGIQVDRYIAS | Human DNMT3A |
| | EVCEDSITVGMVRHQGKIMYVGDVRSVTQKHIQEWGPFDLVIGGSPCNDL | |
| | SIVNPARKGLYEGTGRLFFEFYRLLHDARPKEGDDRPFFWLFENVVAMGV | |
| | SDKRDISRFLESNPVMIDAKEVSAAHRARYFWGNLPGMNRPLASTVNDKL | |
| | ELQECLEHGRIAKFSKVRTITTRSNSIKQGKDQHFPVFMNEKEDILWCTEME | |
| | RVFGFPVHYTDVSNMSRLARQRLLGRSWSVPVIRHLFAPLKEYFACV | |
| 666 | NPLEMFETVPVWRRQPVRVLSLFEDIKKELTSLGFLESGSDPGQLKHVVDV | C-terminal human |
| | TDTVRKDVEEWGPFDLVYGATPPLGHTCDRPPSWYLFQFHRLLQYARPKP | DNM3L |
| | GSPRPFFWMFVDNLVLNKEDLDVASRFLEMEPVTIPDVHGGSLQNAVRVW | |
| | SNIPAIRSRHWALVSEEELSLLAQNKQSSKLAAKWPTKLVKNCFLPLREYF | |
| | KYFSTELTSSL | |
| 667 | SSGNSNANSRGPSFSSGLVPLSLRGSH | Linker |
| 668 | MGSRETPSSCSKTLETLDLETSDSSSPDADSPLEEQWLKSSPALKEDSVDVV | Murine DNMT3L |
| | LEDCKEPLSPSSPPTGREMIRYEVKVNRRSIEDICLCCGTLQVYTRHPLFEGG | |
| | LCAPCKDKFLESLFLYDDDGHQSYCTICCSGGTLFICESPDCTRCYCFECVD | |
| | ILVGPGTSERINAMACWVCFLCLPFSRSGLLQRRKRWRHQLKAFHDQEGA | |
| | GPMEIYKTVSAWKRQPVRVLSLFRNIDKVLKSL | |
| | GFLESGSGSGGGTLKYVEDVTNVVRRDVEKWGPFDLVYGSTQPLGSSCDR | |
| | CPGWYMFQFHRILQYALPRQESQRPFFWIFMDNLLLTEDDQETTTRFLQTE | |
| | AVTLQDVRGRDYQNAMRVWSNIPGLKSKHAPLTPKEEEYLQAQVRSRSKL | |
| | DAPKVDLLVKNCLLPLREYFKYFSQNSLPL | |
| 669 | RTLVTFKDVFVDFTREEWKLLDTAQQILYRNVMLENYKNLVSLGYQLTKP | KRAB |
| | DVILRLEKGEEPWLVEREIHQETHPDSETAFEIKSSV | |
| 670 | PKKKRKVGIHGVPAA | NLS and linker |
| 671 | DYKDDDDK | Flag tag |
| 672 | EASGSGRASPGIPGSTR | Linker |
| 673 | GIHGVPAA | Linker |
| 674 | MDYKDHDGDYKDHDI DYKDDDDK | 3 x Flag |
| | | peptide |
| 675 | YPYDVPDYA | HA tag |
| 676 | HHHHHH | poly-histidine |
| | | tag |
| 677 | KRPAATKKAGQAKKKKASDAKSLTAWS | Linker |
| 678 | NTCCACAGCCTTCCACCAAGCTCTGCAGGATCCCAGAGTCAGGGGTCTG | Hep3B Consensus |
| | TATTTTCCTGCTGGTGGCTCCAGTTCAGGAACAGTAAACCCTGCTCCGA | sequence |
| | ATATTGCCTCTCACATCTCGTCAATCTCCGCGAGGACTGGGGACCCTGT | (3222 bp) |
| | GACGAACATGGAGAACATCACATCAGGATTCCTAGGACCCCTGCTCGT | |
| | GTTACAGGCGGGGTTTTTCTCGTTGACAAGAATCCTCACAATACCGCAG | |
| | AGTCTAGACTCGTGGTGGACTTCTCTCAGTTTTCTAGGGGGTCCACCCG | |
| | TGTGTCTTGGCCAAAATTCGCAGTCCCCAACCTCCAATCACTCACCAAC | |
| | CTCCTGTCCTCCAATCTGTCCTGGTTATCGCTGGATGTGTCTGCGGCGTT | |
| | TTATCATATTCCTCTTCATCCTGCTGCTATGCCTCATCTTCTTATTGGTTC | |
| | TTCTGGATTATCAAGGTATGTTGCCCGTTTGTCCTCTAATTCCAGGATCA | |
| | ACAACAACCAGTACGGGACCATGCAAAACCTGCACGACTCCTGCTCAA | |
| | GGCAACTCTATGTTTCCCTCATGTTGCTGTACAAAACCTACGGATGGAA | |
| | ATTGCACCTGTATTCCCATCCCATCGTCTTGGGCTTTCGCAAAATACCTA | |
| | TGGGAGTGGGCCTCAGTCCGTTTCTCTTGGCTCAGTTTACTAGTGCCATT | |
| | TGTTCAGTGGTTCGTAGGGCTTTCCCCCACTGTTTGGCTTTCAGCTATAT | |
| | GGATGATGTGGTATTGGGGGCCAAGACTGTACAGCATCGTGAGTCCCTT | |
| | TATACCGCTGTTACCAATTTTCTTTTGTCTCTGGGTATACATTTAAACCC | |
| | TAACAAAACAAAAAGATGGGGTTATTCCCTAAACTTCATGGGTTACGTA | |
| | ATTGGAAGTTGGGGGACATTGCCACAAGATCATATTGTACAAAAGATC | |
| | AAACACTGTTTTAGAAAACTTCCTGTAAACAGGCCTATTGATTGGAAAG | |
| | TATGTCAAAGGATTGTGGGTCTTTTGGGCTTTGCTGCTCCATTTACACAA | |
| | TGTGGATATCCTGCCTTAATGCCTTTGTATGCATGTATACAAGCTAAAC | |
| | AGGCTTTCACTTTCTCGCCAACTTACAAGGCCTTTCTAAGTAAACAGTA | |
| | CCTGAACCTTTACCCCGTTGCTCGGCAACGGCCAGGTCTGTGCCAAGTG | |
| | TTTGCTGACGCAACCCCCACTGGCTGGGGCTTAGCCATAGGCCATCAGC | |
| | GCATGCGTGGAACCTTTGTGGCTCCTCTGCCGATCCATACTGCGGAACT | |
| | CCTAGCCGCTTGTTTTGCTCGCAGCCGGTCTGGAGCAAAGCTCATCGGA | |
| | ACTGACAATTCTGTCGTCCTCTCGCGGAAATATACATCGTTTCCATGGCT | |
| | GCTAGGCTGTACTGCCAACTGGATCCTTCGCGGGACGTCCTTTGTTTAC | |
| | GTCCCGTCGGCGCTGAATCCCGCGGACGACCCCTCTCGGGGCCGCTTGG | |
| | GACTCTCTCGTCCCCTTCTCCGTCTGCCGTTCCAGCCGACCACGGGGCG | |
| | CACCTCTCTTTACGCGGTCTCCCCGTCTGTGCCTTCTCATCTGCCGGTCC | |
| | GTGTGCACTTCGCTTCACCTCTGCACGTTGCATGGAGACCACCGTGAAC | |
| | GCCCATCAGAGCCTGCCCAAGGTCTTACATAAGAGGACTCTTGGACTCC | |
| | CAGCAATGTCAACGACCGACCTTGAGGCCTACTTCAAAGACTGTGTGTT | |
| | TAAGGACTGGGAGGAGCTGGGGGAGGAGATTAGGTTAATGATCTTTGT | |
| | ATTAGGAGGCTGTAGGCATGAGCCTTTTATGCCTAAGAATGTGTCTGTC | |
| | TCATAATGCAAGTGGTCAATCCAGCCAGCACCATGCGAACTTTTTCACC | |
| | TCTGCCTAATCATCTCTTGTACATGTCCCACTGTTCAAGCCTCCAAGCTG | |
| | TGCCTTGGGTGGCTTTGGGGCATGGACATTGACCCTTATAAAGAATTTG | |
| | GAGCTACTGTGGAGTTACTCTCGTTTTTGCCTTCTGACTTTTTTCCTTCCG | |
| | TCAGAGATCTCCTAGACACCGCCTCAGCTCTGTATCGGGAAGCCTTAGA | |
| | GTCTCCTGAGCATTGCTCTCCTCACCATACTNNNNNNNNNNNNNNNNN | |
| | NNNNNNNNNNNNNNNNNNNNNNNNNNNNNNNNNNNNNNNNNNNNNN | |
| | NNNNNNNNNNNNNNNNNNNNNNNNNNNNNNNNNNNNNNNNNNNNNN | |
| | NNNNNNNNNNNNNNNNNNNNNNNNNNNNNNNNNNNNNNNNNNNNNN | |
| | NNNNNNNNNNNNNNNNNNNNNNNNNNNNNNNNNNNNNNNNNNNNNN | |
| | NNNNNNNNNNNNNNNNNNNNNNNNNNNNNNNNNNNNNNNNNNNNNN | |
| | NNNNNNNNNNNNNNNNNNNNNNNNNNNNNNNNNNNNNNNNNNNNNN | |
| | NNNNNNNNNNNNNNNNNNNNNNNNNNNNNNNNNNNNNNNNNNNNNN | |
| | NNNNNNNNNNNNNNNNNNNNNNNNNNNNNNNNNNNNNNNNNNNNNN | |
| | NNNNNNNNNNNNNNNNNNNNNNNNNNNNNNNNNNNNNNNNNNNNNN | |
| | NNNNNNNNNNNNNNNNNNNNNNNNNNNNNNNNNNNNNNNNNNNNNN | |
| | NNNNNNNNNNNNNNNNNNNNNNNNNNNNNNNNNNNNNNNNNNNNNN | |
| | NNNNNNNNNNNNNNNNNNNNNNNNNNNNNNNNNNNNNNNNNNNNNN | |
| | NNNNNNNNNNNNNNNNNNNNNNNNNNNNNNNNNNNNNNNNNNNNNN | |
| | NNNNNNNNNNNNNNNNNNNNNNNNNNNNNNNNNNNNNNNNNNNNNN | |
| | NNNNNNNNNNNNNNNNNNNNNNNNNNNNNNNNNNNNNNNNNNNNNN | |
| | NNNNNNNNNNNNNNNNNNNNNNNNNNNNNNNNNNNNNNNNNNNNNN | |
| | NNNNNNNNNNNNNNNNNNNNNNNNNNNNNNNNNNNNNNNNNNNNNN | |
| | NNNNNNNNNNNNNNNNCCTCTGGGATTCTTTCCCGATCATCAGTTGGA | |
| | CCNNNNNNNNNNNNNNNNNNNNNNNAATCCAGATTGGGACTTCAACC | |
| | CCATCAAGGACCACTGGCCAGCAGCCAACCAGGTAGGAGTGGGAGCAT | |
| | TCGGGCCAGGGTTCACCCCTCCACACGGCGGTGTTTTGGGGTGGAGCCC | |
| | TCAGGCTCAGGGCATACTACAAACTGTGTCAACAATTCCTCCTCCTGCC | |
| | TCCACCAATCGGCAGTCAGGAAGGCAGCCTACTCCCATCTCTCCACCTC | |
| | TAAAAGACAGTCATCCTCAGGCCACGCAGTGGAA | |
| 679 | ttccacagccttccaccaagctctgcaagatcccagagtcaggggcctgtattttcctgctggtggctcc | PLC/PRF/5 Cells |
| | agttcaggaacagtaaaccctgctcagaatattgcctctcacatctcgtcaatctcctcgaggactgggg | (Alexander |
| | accctgcaccgaacatggagaacattacatcaggattcctaggacccctgctcgtgttacaggcggggtt | Cells) Consensus |
| | tttcttgttgacaagaatcctcacaataccacagagtctagactcgtggtggacttctctcaattttcta | Genome: |
| | gggggatcacccgtgtgtcttggccaaaattcgcagtccccaacctccaatcactcaccaacctcctgtc | LC533934.1 |
| | ctccaatttgtcctggttatcgctggatgtgtctgcggcgttttatcatattcctcttcatcctgctgct | (3213 bp) |
| | atgcctcatcttcttattggttcttctggactatcaaggtatgttgcccgtttgtcctctaattccagga | |
| | tccacaacaaccagtacgggaccctgcaaaacctgcacgactcctgctcaaggcaactctatgtttccct | |
| | catgttgctgtacaaaacctacggatggaaattgcacctgtattcccatcccatcatcttgggctttcgc | |
| | aaaatacctatgggagtggggctcagtccgtttctcttggctcagtttactagtgccatttgttcagtg | |
| | gttcgtagggctttcccccactgtttggctttcagttatatggatgatgtggtattgggggccaaatctg | |
| | tacaacatcttgagtccctttataccgctgttaccaattttcttttgtctttgggtatacatttaaaccc | |
| | taacaaaacgaagagatggggttattccctaaacttcatgggatatgtaattggaagttggggtaccttg | |
| | ccacaggatcatattgtacaaaaaatcaaacgctgttttaggaaacttcctgtcaatcgacctattgatt | |
| | ggaaagtatgtcaaagaattgtgggtcttttgggctttgccgcgccctttacacaatgtggttaccctg | |
| | ccttaatgcctttatatgcatgtatacaagcaaaacaggcttttactttctcgccaacttacaaggcctt | |
| | tctaagtaaacagtatatgaacctttaccccgttgcccggcaacggcctggcctgtgccaagtgtttgct | |
| | gacgcaacccccactggctggggcttggctatgggccatcagcgcatgcgtggaacctttgtggctcctc | |
| | tgccgatccatactgcggaacttcttgcagcttgttttgctcgcagccggtctggagcgaaactcatcgg | |
| | gactgataattctgtcgtcctttctcggaaatatacatcatttccatggctgctaggttgtgctgctaac | |
| | tggattcttcgcgggacgtcctttgtctacgtcccgtcggcgctgaatcctgcggacgacccctcccggg | |
| | gccgcttgggactctatcgtccccttcttcgtctgccgtaccgtccgaccacggggcgcacctctcttta | |
| | cgcggtctccccgtctgtgccttctcatctgccggtccgtgtgcacttcgcttcacctctgcacgttgca | |
| | tggagaccaccgtgaacgcccatcggatcctgcccaaggtcttacataagaggactcttggactcccagc | |
| | aatgtcaacgaccgaccttgaggcttacttcaaagactgtgtgtttaaagactgggaggagttgggggag | |
| | gagattaggttaaatattaggaggctgtaggcataaattggtctgcgcaccatcatcatgcaactttttc | |
| | acctctgcctattcatctctcgttcatgtcctactgttcaagcctccaagctgtgccttgggtggcttta | |
| | gggcatggacattgacccttataaagaatttggagctactgtggagttactctcgtttttgccttctgac | |
| | ttctttccttcggtccgagatctcctagacaccgcctcagctctatatcgggaagccttagagtctcctg | |
| | agcattgttcccctcatcatacagcactcaggcaagcaattctttgctggggggaattaatgactctagc | |
| | tacctggggggtaataatttggaagatccagcatccagggatctagtagtcaattatgtgaatactaaca | |
| | tgggcctaaagatcagacaactattgtggtttcatatttcttgccttacttttggaagagaaacagtgct | |
| | tgagtatttggtctccttcggagtgtggattcgcactcctccagcctatagaccaccaaatgcccctatc | |
| | ttatcaacacttccggaaactactgttgttagacgacgagaccgaggcaggtcccctagaagaagaact | |
| | ccctcgcctcgcagacgaagatctcaatcgccgcgtcgcagaagatctcaatctcgggaatctcaatgtt | |
| | agtattccttggactcataaggtgggaaattttactgggctttattcctctactgtccctatctttaatc | |
| | ctgaatggcaaacgccttcctttcctaaaatccatttacacgaggacattattaataggtgtcagcaatt | |
| | tgtaggccctctcactgtaaatgaaaagagaagattgaacttaattatgcctgctaggttttatcctaac | |
| | tccactaaatatttgcctctagacaaaggaattaagccttattatcctgaacatgtagttaatcattact | |
| | tccagacccgacattatttacatactctttggaaggctgggattctatataagagggaaactacacgtag | |
| | cgcctcattttgcgggtcaccatattcttgggaacaagagctacatcatgggaggttggttaccaaaacc | |
| | tcgcaaaggcatggggacgaatctgtctgtccccaaccctctgggattctttcccgatcatcagttggac | |
| | ccagcattcggagccaattcaaacaatccagactgggacttcaaccccacaaaggaccactggccacaag | |
| | ccaaccaggtaggagtgggagcattcggcccagggttcacccctccacacggaggtcttttggggtggag | |
| | ctctcaggctcaaggcacattgcatactgtgccagcagtgcctcctcctgcctccaccaatcggcagtca | |
| | ggaaggcagcctactcccatctctccacctctaagagacagtcatcctcaggccatgcagtggaa | |
| 680 | ggagcaauugaccgggaagcucagaauaaacgcucaacuuuggccggaucuucuagagccaccaugaacca | HBVg_mRNA_1 |
| | cgaucaggaguuugaccccccuaagguguacccacccgugccagccgagaagaggaagcccauccgcgugc | |
| | ugucccuguucgacggcaucgccacaggccugcuggugcugaaggaucugggcauccagguggacagaua | |
| | uaucgccuccgaggugugcgaggauucuaucaccgugggcauggugaggcaccagggcaagaucauguac | |
| | gugggcgacgugcgcagcgugacacagaagcacauccaggaguggggacccuucgaccuggucaucggag | |
| | gcagccccuguaaugaccuguccaucgugaacccugcaaggaagggccuguaugagggaaccggcagacug | |
| | uucuuugaguucuacaggcugcugcacgacgcccgcccuaaggaggggaugacaggccauuuuuuggc | |
| | uguuugagaacgugguggccaugggcgugagcgacaagcgggauaucuccagauuccuggagucuaaucc | |
| | cgugaugaucgaugcaaaggaggugucugccgcacacagggcaagguacuuuuggggaaaucugccuggc | |
| | augaaccgcccacuggccagcaccgugaacgacaagcuggagcugcaggagugccuggagcacggaaggau | |
| | cgccaaguucuccaaggugcggacaaucaccacaagaucuaacagcaucaagcagggcaaggaucagcacuu | |
| | ccccguguucaugaaugagaaggaggacauccugugguguaccgagauggagcgcguguucggcuuucca | |
| | gugcacuauacagacgugagcaauaugagccggcuggcaaggcagagacugcugggccgguccuggucug | |
| | ugccagugaucagacaccuguucgccccccugaaggaguacuuugccugcgugucuagcggcaacucuaau | |
| | gccaacagcagaggcccuuccuuuuccucuggccuggugccacugucucugaggggcagccacaugggccc | |
| | cauggagaucuacaagaccguguccgccuggaagaggcagccugugcgcgugcugucucuguuccgcaaca | |
| | ucgacaaggugcucaagagccugggcuuucuggagagcggauccggaucuggaggaggcacccugaagua | |
| | uguggaggaugugacaaauguggugcggagagauguggagaaguggggccccuucgaucugguguacgg | |
| | auccacccagccacugggaagcuccugcgauagguguccaggaugguauauguuccaguuucacagaaucc | |
| | ugcaguacgcacugccaaggcaggagagccagcgcccuuucuuuuggaucuuuauggacaaccugcugcu | |
| | gacagaggaugaccaggagacaacaacccgcuuccugcagacagaggcagugacccugcaggaugugaggg | |
| | gacgcgacuaucagaaugccaugcggguguggucuaacaucccuggccugaaaagcaagcacgccccccug | |
| | accccuaaggaggaggaguaccugcaggcccaggugcggagcagauccaagcuggaugccccuaaggugga | |
| | ccugcuggugaagaauugucugcugccacugcgggaguacuucaaguacuuuagucagaauagccugcca | |
| | cuggaggcaagcggauccggaagggcaucuccuggaaucccaggaagcacccgcaaccccaagaagaagcg | |
| | gaaggugggcauccacggcgugcccgccgccgacaagaaguacagcaucggccuggccaucggcaccaaca | |
| | gcgugggcugggccgugaucaccgacgaguacaaggugcccagcaagaaguucaaggugcugggcaacacc | |
| | gaccggcacagcaucaagaagaaccugaucggcgcccugcuguucgacagcggcgagaccgccgaggccac | |
| | ccggcugaagcggaccgcccggcggcgguacacccggcggaagaaccggaucugcuaccugcaggagaucu | |
| | ucagcaacgagauggccaagguggacgacagcuucuuccaccggcuggaggagagcuuccugguggagga | |
| | ggacaagaagcacgagcggcaccccaucuucggcaacaucguggacgagguggccuaccacgagaaguacc | |
| | ccaccaucuaccaccugcggaagaagcugguggacagcaccgacaaggccgaccugcggcugaucuaccug | |
| | gcccuggcccacaugaucaaguuccggggccacuuccugaucgagggcgaccugaaccccgacaacagcga | |
| | cguggacaagcuguucauccagcuggugcagaccuacaaccagcuguucgaggagaaccccaucaacgcca | |
| | gcggcguggacgccaaggccauccugagcgcccggcugagcaagagccggcggcuggagaaccugaucgcc | |
| | cagcugcccggcgagaagaagaacggccuguucggcaaccugaucgcccugagccugggccugacccccaa | |
| | cuucaagagcaacuucgaccuggccgaggacgccaagcugcagcugagcaaggacaccuacgacgacgaccu | |
| | ggacaaccugcuggcccagaucggcgaccaguacgccgaccuguuccuggccgccaagaaccugagcgacg | |
| | ccauccugcugagcgacauccugcgggugaacaccgagaucaccaaggccccccugagcgccagcaugauca | |
| | agcgguacgacgagcaccaccaggaccugacccugcugaaggcccuggugcggcagcagcugcccgagaag | |
| | uacaaggagaucuucuucgaccagagcaagaacggcuacgccggcuacaucgacggcggcgccagccagga | |
| | ggaguucuacaaguucaucaagcccauccuggagaagauggacggcaccgaggagcugcuggugaagcuga | |
| | accgggaggaccugcugcggaagcagcggaccuucgacaacggcagcaucccccaccagauccaccugggc | |
| | gagcugcacgccauccugcggcggcaggaggacuucuaccccuuccugaaggacaaccgggagaagaucga | |
| | gaagauccugaccuuccggauccccuacuacgugggcccccuggcccggggcaacagccgguucgccugga | |
| | ugacccggaaaagcgaggagaccaucacccccuggaacuucgaggaggugguggacaagggcgccagcgcc | |
| | cagagcuucaucgagcggaugaccaacuucgacaagaaccugcccaacgagaaggugcugcccaagcacagc | |
| | cugcuguacgaguacuucaccguguacaacgagcugaccaaggugaaguacgugaccgagggcaugcggaa | |
| | gcccgccuuccugagcggcgagcagaagaaggccaucguggaccugcuguucaagaccaaccggaagguga | |
| | ccgugaagcagcugaaggaggacuacuucaagaagaucgagugcuucgacagcguggagaucagcggcgu | |
| | ggaggaccgguucaacgccagccugggcaccuaccacgaccugcugaagaucaucaaggacaaggacuucc | |
| | uggacaacgaggagaacgaggacauccuggaggacaucgugcugacccugacccuguucgaggaccgggag | |
| | augaucgaggagcggcugaagaccuacgcccaccuguucgacgacaaggugaugaagcagcugaagcggcg | |
| | gcgguacaccggcuggggccggcugagccggaagcugaucaacggcauccgggacaagcagagcggcaaga | |
| | ccauccuggacuuccugaaaagcgacggcuucgccaaccggaacuucaugcagcugauccacgacgacagcc | |
| | ugaccuucaaggaggacauccagaaggcccaggugagcggccagggcgacagccugcacgagcacaucgcc | |
| | aaccuggccggcagccccgccaucaagaagggcauccugcagaccgugaaggugguggacgagcuggugaa | |
| | ggugaugggccggcacaagcccgagaacaucgugaucgagauggcccgggagaaccagaccacccagaagg | |
| | gccagaagaacagccgggagcggaugaagcggaucgaggagggcaucaaggagcugggcagccagauccug | |
| | aaggagcaccccguggagaacacccagcugcagaacgagaagcuguaccuguacuaccugcagaacggccg | |
| | ggacauguacguggaccaggagcuggacaucaaccggcugagcgacuacgacguggacgccaucgugcccc | |
| | agagcuuccugaaggacgacagcaucgacaacaaggugcugacccggagcgacaagaaccggggcaagagc | |
| | gacaacgugcccagcgaggagguggugaagaagaugaagaacuacuggcggcagcugcugaacgccaagcu | |
| | gaucacccagcggaaguucgacaaccugaccaaggccgagcggggcggccugagcgagcuggacaaggccg | |
| | gcuucaucaagcggcagcugguggagacccggcagaucaccaagcacguggcccagauccuggacagccgg | |
| | augaacaccaaguacgacgagaacgacaagcugauccgggaggugaaggugaucacccugaaaagcaagcu | |
| | ggugagcgacuuccggaaggacuuccaguucuacaaggugcgggagaucaacaacuaccaccacgcccacg | |
| | acgccuaccugaacgccguggugggcaccgcccugaucaagaaguaccccaagcuggagagcgaguucgug | |
| | uacggcgacuacaagguguacgacgugcggaagaugaucgccaagagcgagcaggagaucggcaaggccac | |
| | cgccaaguacuucuucuacagcaacaucaugaacuucuucaagaccgagaucacccuggccaacggcgagau | |
| | ccggaagcggccccugaucgagaccaacggcgagaccggcgagaucgugugggacaagggccgggacuucg | |
| | ccaccgugcggaaggugcugagcaugccccaggugaacaucgugaagaagaccgaggugcagaccggcggc | |
| | uucagcaaggagagcauccugcccaagcggaacagcgacaagcugaucgcccggaagaaggacugggaccc | |
| | caagaaguacggcggcuucgacagccccaccguggccuacagcgugcuggugguggccaagguggagaag | |
| | ggcaagagcaagaagcugaaaagcgugaaggagcugcugggcaucaccaucauggagcggagcagcuucga | |
| | gaagaaccccaucgacuuccuggaggccaagggcuacaaggaggugaagaaggaccugaucaucaagcugc | |
| | ccaaguacagccuguucgagcuggagaacggccggaagcggaugcuggccagcgccggcgagcugcagaag | |
| | ggcaacgagcuggcccugcccagcaaguacgugaacuuccuguaccuggccagccacuacgagaagcugaa | |
| | gggcagccccgaggacaacgagcagaagcagcuguucguggagcagcacaagcacuaccuggacgagauca | |
| | ucgagcagaucagcgaguucagcaagcgggugauccuggccgacgccaaccuggacaaggugcugagcgcc | |
| | uacaacaagcaccgggacaagcccauccgggagcaggccgagaacaucauccaccuguucacccugaccaac | |
| | cugggcgcccccgccgccuucaaguacuucgacaccaccaucgaccggaagcgguacaccagcaccaaggag | |
| | gugcuggacgccacccugauccaccagagcaucaccggccuguacgagacccggaucgaccugagccagcu | |
| | gggcggcgacagcggcggcaagcggcccgccgccaccaagaaggccggccaggccaagaagaagaaggcua | |
| | gcgaugcuaagucacugacugccuggucccggacacuggugaccuucaaggauguguuuguggacuucac | |
| | cagggaggaguggaagcugcuggacacugcucagcagauccuguacagaaaugugaugcuggagaacuau | |
| | aagaaccugguuuccuuggguuaucagcuuacuaagccagaugugauccuccgguuggagaagggagagg | |
| | aacccuggcugguggagagagaaauucaccaagagacccauccugauucagagacugcauuugaaaucaaa | |
| | ucaucaguuccgaaaaagaaacgcaaaguuuaguaagaauucaaagaaaguuucuucacauucucucgagc | |
| | guacgaaaaaaaaaaaaaaaaaaaaaaaaaaaaaaaaaaaaaaaaaaaaaaaaaaaaaaaaaaaaaaaaa | |
| | aaaaaaaaaaaaaaaaaaaaaa | |
| | aaaaaaaaaaaaa | |
| 681 | ggagcaauugaccgggaagcucagaauaaacgcucaacuuuggccggaucuucuagagccacc | 5′ UTR (5U4) |
| 682 | uaguaagaauucaaagaaaguuucuucacauucucucgagcguacg | 3′ UTR (3U2) |

What is claimed:

1. An epigenetic-modifying DNA-targeting system comprising at least one DNA-targeting module for repressing transcription of one or more Hepatitis B viral (HBV) genes, wherein each of the at least one DNA-targeting module comprises a fusion protein comprising:
(a) a DNA-binding domain for targeting to a target site in a Hepatitis B viral DNA sequence, wherein the target site is within a target region that has a sequence corresponding to the sequence located at base pairs between 1033 bp-1749 bp in a Hepatitis B viral sequence with reference to nucleotide positions of SEQ ID NO: 650; and
(b) at least one transcriptional repressor effector domain.

2. The epigenetic-modifying DNA-targeting system of claim 1, wherein the target site is within a target region located within 300 base pairs upstream of the hepatitis B X protein (HBx) start codon.

3. An epigenetic-modifying DNA-targeting system comprising at least one DNA-targeting module for repressing transcription of a Hepatitis B viral (HBV) gene, wherein the DNA-targeting module comprises a fusion protein comprising:
(a) a DNA-binding domain for targeting to a target site within a target region spanning within 300 base pairs upstream of the hepatitis B X protein (HBx) start codon; and
(b) at least one transcriptional repressor effector domain.

4. The epigenetic-modifying DNA-targeting system of claim 1, wherein the target site is positioned in the HBx basal core promoter region.

5. The epigenetic-modifying DNA-targeting system of claim 1, wherein the target site is positioned within the HBx promoter/Enhancer region.

6. The epigenetic-modifying DNA-targeting system of claim 1, wherein the target site is within a target region spanning within 150 base pairs upstream of the hepatitis B X protein (HBx) start codon.

7. The epigenetic-modifying DNA-targeting system of claim 1, wherein the target site is within a target region that has a sequence corresponding to the sequence located at base pairs between 1255-1302 bp with reference to the HBV genome set forth in SEQ ID NO: 650.

8. The epigenetic-modifying DNA-targeting system of claim 1, wherein the target site is within a target region that has a sequence corresponding to the sequence located at base pairs between 1260-1300 bp with reference to the HBV genome set forth in SEQ ID NO: 650.

9. The epigenetic-modifying DNA-targeting system of claim 1, wherein the target site comprises the sequence set forth in SEQ ID NO: 22 or SEQ ID NO:63, a contiguous portion thereof of at least 14 nucleotides, or a complementary sequence of any of the foregoing.

10. The epigenetic-modifying DNA-targeting system of claim 1, wherein the at least one DNA-binding domain comprises a Clustered Regularly Interspaced Short Palindromic Repeats associated (Cas)-guide RNA (gRNA) combination comprising (a) a deactivated Cas (dCas) and (b) at least one gRNA.

11. The epigenetic-modifying DNA-targeting system of claim 10, wherein the dCas is a dCas9 protein.

12. The epigenetic-modifying DNA-targeting system of claim 11, wherein the dCas9 is a Streptococcus pyogenes dCas9 (dSpCas9) protein that comprises at least one amino acid mutation selected from D10A and H840A, with reference to numbering of positions of SEQ ID NO: 598.

13. The epigenetic-modifying DNA-targeting system of claim 12, wherein the gRNA comprises the sequence set forth in SEQ ID NO: 217, a contiguous portion thereof of at least 14 nucleotides, or a complementary sequence of any of the foregoing.

14. The epigenetic-modifying DNA-targeting system of claim 13, wherein the gRNA is set forth in SEQ ID NO: 412.

15. The epigenetic-modifying DNA-targeting system of claim 12, wherein the gRNA comprises the sequence set forth in SEQ ID NO: 258, a contiguous portion thereof of at least 14 nucleotides, or a complementary sequence of any of the foregoing.

16. The epigenetic-modifying DNA-targeting system of claim 15, wherein the gRNA is set forth in SEQ ID NO: 453.

17. The epigenetic-modifying DNA-targeting system of claim 1, wherein the at least one DNA-binding domain comprises an engineered zinc finger protein (eZFP).

18. The epigenetic-modifying DNA-targeting system of claim 17, wherein the target site comprises the nucleotide sequence set forth in any one of SEQ ID NOS: 1045, 1046, 1052, a contiguous portion thereof of at least 12 nt, or a complementary sequence of any of the foregoing.

19. The epigenetic-modifying DNA-targeting system of claim 17, wherein the zinc finger protein comprises six zinc fingers denoted F1 through F6 in order from N-terminus to C-terminus, and wherein the amino acid sequence of each zinc finger recognition region is as follows:
(A)
F1:
(SEQ ID NO: 822)
QSAHRKN
F2:
(SEQ ID NO: 823)
TSSNRKT
F3:
(SEQ ID NO: 824)
RSDNLSA
F4:
(SEQ ID NO: 825)
RNNDRKT
F5:
(SEQ ID NO: 826)
TSGSLSR
F6:
(SEQ ID NO: 827)
QAGHLAK;
(B)
F1:
(SEQ ID NO: 828)
RSDHLSQ
F2:
(SEQ ID NO: 829)
ASSTRTK
F3:
(SEQ ID NO: 830)
RSDDLTR
F4:
(SEQ ID NO: 831)
QKSNLSS
F5:
(SEQ ID NO: 832)
QSANRTT
F6:
(SEQ ID NO: 833)
QNATRTK;
or
(C)
F1:
(SEQ ID NO: 864)
QSSSLVR
F2:
(SEQ ID NO: 865)
QSGDLRR
F3:
(SEQ ID NO: 866)
RSDERKR
F4:
(SEQ ID NO: 867)
HRTTLTN
F5:
(SEQ ID NO: 868)
RSDHLTN
F6:
(SEQ ID NO: 869)
TSGELVR.

20. The epigenetic-modifying DNA-targeting system of claim 19, wherein the eZFP comprises the sequence set forth in SEQ ID NO: 709, SEQ ID NO: 710 or SEQ ID NO:716, or an amino acid sequence that has at least 90% sequence identity thereto.

21. The epigenetic-modifying DNA-targeting system of claim 1, wherein at least one effector domain is a DNA methyltransferase.

22. The epigenetic modifying DNA-targeting system of claim 1, wherein at least one effector domain comprises a DNA methyltransferase and a repressor domain capable of recruiting heterochromatin inducing factors.

23. The epigenetic modifying DNA-targeting system of claim 1, wherein at least one effector domain comprises a DNA methyltransferase and a histone methyltransferase.

24. The epigenetic-modifying DNA-targeting system of claim 1, wherein at least one effector domain is selected from a KRAB repressor domain, ERF repressor domain, Mxi1 repressor domain, SID4X repressor domain, Mad-SID repressor domain. LSD1 repressor domain, or DNMT3A, DNMT3A-3L, DNMT3A/L-KRAB fusion repressor domain, DNMT3B domain binding protein or LSD1 repressor domain, or variant of any of the foregoing.

25. The epigenetic-modifying DNA-targeting system of claim 3, wherein at least one effector domain is a DNA methyltransferase.

26. The epigenetic modifying DNA-targeting system of claim 3, wherein at least one effector domain comprises a DNA methyltransferase and a repressor domain capable of recruiting heterochromatin inducing factors.

27. The epigenetic modifying DNA-targeting system of claim 3, wherein at least one effector domain comprises a DNA methyltransferase and a histone methyltransferase.

28. The epigenetic-modifying DNA-targeting system of claim 3, wherein at least one effector domain is selected from a KRAB repressor domain, ERF repressor domain, Mxi1 repressor domain, SID4X repressor domain, Mad-SID repressor domain. LSD1 repressor domain, or DNMT3A, DNMT3A-3L, DNMT3A/L-KRAB fusion repressor domain, DNMT3B domain binding protein or LSD1 repressor domain, or variant of any of the foregoing.

29. A polynucleotide encoding the epigenetic-modifying DNA-targeting system of claim 1 or a fusion protein of the DNA-targeting system of claim 1, or a portion or a component of any of the foregoing.

30. A vector comprising the polynucleotide of claim 29.

The application's sequence listing, which the Patent Office published only in electronic form, follows.

SEQUENCE LISTING (1071 sequences)

SEQ ID NO: 1 - DNA, 20 bp, Synthetic construct
  misc_feature 1..20: note = DNA protospacer sequence
  source 1..20: mol_type = other DNA
ccctatcttatcaacacttc

SEQ ID NO: 2 - DNA, 20 bp, Synthetic construct
  misc_feature 1..20: note = DNA protospacer sequence
  source 1..20: mol_type = other DNA
gcagaggtgaaaaagttgca

SEQ ID NO: 3 - DNA, 20 bp, Synthetic construct
  misc_feature 1..20: note = DNA protospacer sequence
  source 1..20: mol_type = other DNA
tggacttctctcaattttct

SEQ ID NO: 4 - DNA, 20 bp, Synthetic construct
  misc_feature 1..20: note = DNA protospacer sequence
  source 1..20: mol_type = other DNA
accccgcctgtaacacgagc

SEQ ID NO: 5 - DNA, 20 bp, Synthetic construct
  misc_feature 1..20: note = DNA protospacer sequence
  source 1..20: mol_type = other DNA
cccgcctgtaacacgagcag

SEQ ID NO: 6 - DNA, 20 bp, Synthetic construct
  misc_feature 1..20: note = DNA protospacer sequence
  source 1..20: mol_type = other DNA
caccacgagtctagactctg

SEQ ID NO: 7 - DNA, 20 bp, Synthetic construct
  misc_feature 1..20: note = DNA protospacer sequence
  source 1..20: mol_type = other DNA
gaggtgaagcgaagtgcaca

SEQ ID NO: 8 - DNA, 20 bp, Synthetic construct
  misc_feature 1..20: note = DNA protospacer sequence
  source 1..20: mol_type = other DNA
ccggaagtgttgataagata

SEQ ID NO: 9 - DNA, 20 bp, Synthetic construct
  misc_feature 1..20: note = DNA protospacer sequence
  source 1..20: mol_type = other DNA
agaagatgaggcatagcagc

SEQ ID NO: 10 - DNA, 20 bp, Synthetic construct
  misc_feature 1..20: note = DNA protospacer sequence
  source 1..20: mol_type = other DNA
tccgcagtatggatcggcag

SEQ ID NO: 11 - DNA, 20 bp, Synthetic construct
  misc_feature 1..20: note = DNA protospacer sequence
  source 1..20: mol_type = other DNA
ggacttctctcaattttcta

SEQ ID NO: 12 - DNA, 20 bp, Synthetic construct
  misc_feature 1..20: note = DNA protospacer sequence
  source 1..20: mol_type = other DNA
ccacccaaggcacagcttgg

SEQ ID NO: 13 - DNA, 20 bp, Synthetic construct
  misc_feature 1..20: note = DNA protospacer sequence
  source 1..20: mol_type = other DNA
agagaggtgcgccccgtggt

SEQ ID NO: 14 - DNA, 20 bp, Synthetic construct
  misc_feature 1..20: note = DNA protospacer sequence
  source 1..20: mol_type = other DNA
gattgagatcttctgcgacg

SEQ ID NO: 15 - DNA, 20 bp, Synthetic construct
  misc_feature 1..20: note = DNA protospacer sequence
  source 1..20: mol_type = other DNA
caagcctccaagctgtgcct

SEQ ID NO: 16 - DNA, 20 bp, Synthetic construct
  misc_feature 1..20: note = DNA protospacer sequence
  source 1..20: mol_type = other DNA
ggcgagggagttcttcttct

SEQ ID NO: 17 - DNA, 20 bp, Synthetic construct
  misc_feature 1..20: note = DNA protospacer sequence
  source 1..20: mol_type = other DNA
tccggaagtgttgataagat

SEQ ID NO: 18 - DNA, 20 bp, Synthetic construct
  misc_feature 1..20: note = DNA protospacer sequence
  source 1..20: mol_type = other DNA
aagccacccaaggcacagct

SEQ ID NO: 19 - DNA, 20 bp, Synthetic construct
  misc_feature 1..20: note = DNA protospacer sequence
  source 1..20: mol_type = other DNA
cctccaagctgtgccttggg

SEQ ID NO: 20 - DNA, 20 bp, Synthetic construct
  misc_feature 1..20: note = DNA protospacer sequence
  source 1..20: mol_type = other DNA
gtaaagagaggtgcgccccg

SEQ ID NO: 21 - DNA, 20 bp, Synthetic construct
  misc_feature 1..20: note = DNA protospacer sequence
  source 1..20: mol_type = other DNA
ggcagatgagaaggcacaga

SEQ ID NO: 22 - DNA, 20 bp, Synthetic construct
  misc_feature 1..20: note = DNA protospacer sequence
  source 1..20: mol_type = other DNA
aggagttccgcagtatggat

SEQ ID NO: 23 - DNA, 20 bp, Synthetic construct
  misc_feature 1..20: note = DNA protospacer sequence
  source 1..20: mol_type = other DNA
gctgtgccttgggtggcttt

SEQ ID NO: 24 - DNA, 20 bp, Synthetic construct
  misc_feature 1..20: note = DNA protospacer sequence
  source 1..20: mol_type = other DNA
acccctgctcgtgttacagg

SEQ ID NO: 25 - DNA, 20 bp, Synthetic construct
  misc_feature 1..20: note = DNA protospacer sequence
  source 1..20: mol_type = other DNA
cggaagtgttgataagatag

SEQ ID NO: 26 - DNA, 20 bp, Synthetic construct
  misc_feature 1..20: note = DNA protospacer sequence
  source 1..20: mol_type = other DNA
cctgctggtggctccagttc

SEQ ID NO: 27 - DNA, 20 bp, Synthetic construct
  misc_feature 1..20: note = DNA protospacer sequence
  source 1..20: mol_type = other DNA
cgagggagttcttcttctag

SEQ ID NO: 28 - DNA, 20 bp, Synthetic construct
  misc_feature 1..20: note = DNA protospacer sequence
  source 1..20: mol_type = other DNA
ggggcgcacctctctttacg

SEQ ID NO: 29 - DNA, 20 bp, Synthetic construct
  misc_feature 1..20: note = DNA protospacer sequence
  source 1..20: mol_type = other DNA
agcttggaggcttgaacagt

SEQ ID NO: 30 - DNA, 20 bp, Synthetic construct
  misc_feature 1..20: note = DNA protospacer sequence
  source 1..20: mol_type = other DNA
aagcctccaagctgtgcctt

SEQ ID NO: 31 - DNA, 20 bp, Synthetic construct
  misc_feature 1..20: note = DNA protospacer sequence
  source 1..20: mol_type = other DNA
cccctgctcgtgttacaggc

SEQ ID NO: 32 - DNA, 20 bp, Synthetic construct
  misc_feature 1..20: note = DNA protospacer sequence
  source 1..20: mol_type = other DNA
gcgagggagttcttcttcta

SEQ ID NO: 33 - DNA, 20 bp, Synthetic construct
  misc_feature 1..20: note = DNA protospacer sequence
  source 1..20: mol_type = other DNA
tactagtgccatttgttcag

SEQ ID NO: 34 - DNA, 20 bp, Synthetic construct
  misc_feature 1..20: note = DNA protospacer sequence
  source 1..20: mol_type = other DNA
gacttctctcaattttctag

SEQ ID NO: 35 - DNA, 20 bp, Synthetic construct
  misc_feature 1..20: note = DNA protospacer sequence
  source 1..20: mol_type = other DNA
attgacccgtataaagaatt

SEQ ID NO: 36 - DNA, 20 bp, Synthetic construct
  misc_feature 1..20: note = DNA protospacer sequence
  source 1..20: mol_type = other DNA
acccaaagacaaaagaaaat

SEQ ID NO: 37 - DNA, 20 bp, Synthetic construct
  misc_feature 1..20: note = DNA protospacer sequence
  source 1..20: mol_type = other DNA
gtcctcttatgtaagacctt

SEQ ID NO: 38 - DNA, 20 bp, Synthetic construct
  misc_feature 1..20: note = DNA protospacer sequence
  source 1..20: mol_type = other DNA
tgatcgggaaagaatcccag

SEQ ID NO: 39 - DNA, 20 bp, Synthetic construct
  misc_feature 1..20: note = DNA protospacer sequence
  source 1..20: mol_type = other DNA
tttgctgacgcaacccccac

SEQ ID NO: 40 - DNA, 20 bp, Synthetic construct
  misc_feature 1..20: note = DNA protospacer sequence
  source 1..20: mol_type = other DNA
atgaatctagccacctgggt

SEQ ID NO: 41 - DNA, 20 bp, Synthetic construct
  misc_feature 1..20: note = DNA protospacer sequence
  source 1..20: mol_type = other DNA
ggtctccatgcgacgtgcag

SEQ ID NO: 42 - DNA, 20 bp, Synthetic construct
  misc_feature 1..20: note = DNA protospacer sequence
  source 1..20: mol_type = other DNA
ggactgaggcccactcccat

SEQ ID NO: 43 - DNA, 20 bp, Synthetic construct
  misc_feature 1..20: note = DNA protospacer sequence
  source 1..20: mol_type = other DNA
cacagagtctagactcgtgg

SEQ ID NO: 44 - DNA, 20 bp, Synthetic construct
  misc_feature 1..20: note = DNA protospacer sequence
  source 1..20: mol_type = other DNA
gaagaaccaacaagaagatg

SEQ ID NO: 45 - DNA, 20 bp, Synthetic construct
  misc_feature 1..20: note = DNA protospacer sequence
  source 1..20: mol_type = other DNA
acacggtccggcagatgaga

SEQ ID NO: 46 - DNA, 20 bp, Synthetic construct
  misc_feature 1..20: note = DNA protospacer sequence
  source 1..20: mol_type = other DNA
gacatgaacatgagatgatt

SEQ ID NO: 47 - DNA, 20 bp, Synthetic construct
  misc_feature 1..20: note = DNA protospacer sequence
  source 1..20: mol_type = other DNA
gcagcacagcctagcagcca

SEQ ID NO: 48 - DNA, 20 bp, Synthetic construct
  misc_feature 1..20: note = DNA protospacer sequence
  source 1..20: mol_type = other DNA
tcctggaattagaggacaaa

SEQ ID NO: 49 - DNA, 20 bp, Synthetic construct
  misc_feature 1..20: note = DNA protospacer sequence
  source 1..20: mol_type = other DNA
gtcttacataagaggactct

SEQ ID NO: 50 - DNA, 20 bp, Synthetic construct
  misc_feature 1..20: note = DNA protospacer sequence
  source 1..20: mol_type = other DNA
ttgtgggtcaccatattctt

SEQ ID NO: 51 - DNA, 20 bp, Synthetic construct
  misc_feature 1..20: note = DNA protospacer sequence
  source 1..20: mol_type = other DNA
cgcaaaatacctatgggagt

SEQ ID NO: 52 - DNA, 20 bp, Synthetic construct
  misc_feature 1..20: note = DNA protospacer sequence
  source 1..20: mol_type = other DNA
gggttgcgtcagcaaacact

SEQ ID NO: 53 - DNA, 20 bp, Synthetic construct
  misc_feature 1..20: note = DNA protospacer sequence
  source 1..20: mol_type = other DNA
agctcttgttcccaagaata

SEQ ID NO: 54 - DNA, 20 bp, Synthetic construct
  misc_feature 1..20: note = DNA protospacer sequence
  source 1..20: mol_type = other DNA
tgacatactttccaatcaat

SEQ ID NO: 55 - DNA, 20 bp, Synthetic construct
  misc_feature 1..20: note = DNA protospacer sequence
  source 1..20: mol_type = other DNA
cagatgagaaggcacagacg

SEQ ID NO: 56 - DNA, 20 bp, Synthetic construct
  misc_feature 1..20: note = DNA protospacer sequence
  source 1..20: mol_type = other DNA
ccccgcctgtaacacgagca

SEQ ID NO: 57 - DNA, 20 bp, Synthetic construct
  misc_feature 1..20: note = DNA protospacer sequence
  source 1..20: mol_type = other DNA
gggtggagccctcaggctca

SEQ ID NO: 58 - DNA, 20 bp, Synthetic construct
  misc_feature 1..20: note = DNA protospacer sequence
  source 1..20: mol_type = other DNA
attccttggactcataaggt

SEQ ID NO: 59 - DNA, 20 bp, Synthetic construct
  misc_feature 1..20: note = DNA protospacer sequence
  source 1..20: mol_type = other DNA
tttgtgggtcaccatattct

SEQ ID NO: 60 - DNA, 20 bp, Synthetic construct
  misc_feature 1..20: note = DNA protospacer sequence
  source 1..20: mol_type = other DNA
gtgaaaaagttgcatggtgc

SEQ ID NO: 61 - DNA, 20 bp, Synthetic construct
  misc_feature 1..20: note = DNA protospacer sequence
  source 1..20: mol_type = other DNA
cctgaactggagccaccagc

SEQ ID NO: 62 - DNA, 20 bp, Synthetic construct
  misc_feature 1..20: note = DNA protospacer sequence
  source 1..20: mol_type = other DNA
tcctctgccgatccatactg

SEQ ID NO: 63 - DNA, 20 bp, Synthetic construct
  misc_feature 1..20: note = DNA protospacer sequence
  source 1..20: mol_type = other DNA
cggctaggagttccgcagta

SEQ ID NO: 64 - DNA, 20 bp, Synthetic construct
  misc_feature 1..20: note = DNA protospacer sequence
  source 1..20: mol_type = other DNA
aatgtcaacgaccgaccttg

SEQ ID NO: 65 - DNA, 20 bp, Synthetic construct
  misc_feature 1..20: note = DNA protospacer sequence
  source 1..20: mol_type = other DNA
gaccttcgtctgcgaggcga

SEQ ID NO: 66 - DNA, 20 bp, Synthetic construct
  misc_feature 1..20: note = DNA protospacer sequence
  source 1..20: mol_type = other DNA
gttgccgggcaacggggtaa

SEQ ID NO: 67 - DNA, 20 bp, Synthetic construct
  misc_feature 1..20: note = DNA protospacer sequence
  source 1..20: mol_type = other DNA
gattgagaccttcgtctgcg

SEQ ID NO: 68 - DNA, 20 bp, Synthetic construct
  misc_feature 1..20: note = DNA protospacer sequence
  source 1..20: mol_type = other DNA
aggacccctgctcgtgttac

SEQ ID NO: 69 - DNA, 20 bp, Synthetic construct
  misc_feature 1..20: note = DNA protospacer sequence
  source 1..20: mol_type = other DNA
tttgaagtatgcctcaaggt

SEQ ID NO: 70 - DNA, 20 bp, Synthetic construct
  misc_feature 1..20: note = DNA protospacer sequence
  source 1..20: mol_type = other DNA
ccgcttgttttgctcgcagc

SEQ ID NO: 71 - DNA, 20 bp, Synthetic construct
  misc_feature 1..20: note = DNA protospacer sequence
  source 1..20: mol_type = other DNA
tgctaggctgtgctgccaac

SEQ ID NO: 72 - DNA, 20 bp, Synthetic construct
  misc_feature 1..20: note = DNA protospacer sequence
  source 1..20: mol_type = other DNA
tgccgattggtggaggcagg

SEQ ID NO: 73 - DNA, 20 bp, Synthetic construct
  misc_feature 1..20: note = DNA protospacer sequence
  source 1..20: mol_type = other DNA
tctttgtactaggaggctgt

SEQ ID NO: 74 - DNA, 20 bp, Synthetic construct
  misc_feature 1..20: note = DNA protospacer sequence
  source 1..20: mol_type = other DNA
cgtcccgcgcaggatccagt

SEQ ID NO: 75 - DNA, 20 bp, Synthetic construct
  misc_feature 1..20: note = DNA protospacer sequence
  source 1..20: mol_type = other DNA
aaagcccaagatgatgggat

SEQ ID NO: 76 - DNA, 20 bp, Synthetic construct
  misc_feature 1..20: note = DNA protospacer sequence
  source 1..20: mol_type = other DNA
gcagatgagaaggcacagac

SEQ ID NO: 77 - DNA, 20 bp, Synthetic construct
  misc_feature 1..20: note = DNA protospacer sequence
  source 1..20: mol_type = other DNA
cgattggtggaggcaggagg

SEQ ID NO: 78 - DNA, 20 bp, Synthetic construct
  misc_feature 1..20: note = DNA protospacer sequence
  source 1..20: mol_type = other DNA
aggaggctgtaggcataaat

SEQ ID NO: 79 - DNA, 20 bp, Synthetic construct
  misc_feature 1..20: note = DNA protospacer sequence
  source 1..20: mol_type = other DNA
ccatgccccaaagccaccca

SEQ ID NO: 80 - DNA, 20 bp, Synthetic construct
  misc_feature 1..20: note = DNA protospacer sequence
  source 1..20: mol_type = other DNA
aggttggggactgcgaattt

SEQ ID NO: 81 - DNA, 20 bp, Synthetic construct
  misc_feature 1..20: note = DNA protospacer sequence
  source 1..20: mol_type = other DNA
agaccttcgtctgcgaggcg

SEQ ID NO: 82 - DNA, 20 bp, Synthetic construct
  misc_feature 1..20: note = DNA protospacer sequence
  source 1..20: mol_type = other DNA
cctggaattagaggacaaac

SEQ ID NO: 83 - DNA, 20 bp, Synthetic construct
  misc_feature 1..20: note = DNA protospacer sequence
  source 1..20: mol_type = other DNA
tttcagttatatggatgatg

SEQ ID NO: 84 - DNA, 20 bp, Synthetic construct
  misc_feature 1..20: note = DNA protospacer sequence
  source 1..20: mol_type = other DNA
gtaacacgagcaggggtcct

SEQ ID NO: 85 - DNA, 20 bp, Synthetic construct
  misc_feature 1..20: note = DNA protospacer sequence
  source 1..20: mol_type = other DNA
catcttcttgttggttcttc

SEQ ID NO: 86 - DNA, 20 bp, Synthetic construct
  misc_feature 1..20: note = DNA protospacer sequence
  source 1..20: mol_type = other DNA
cggggagaccgcgtaaagag

SEQ ID NO: 87 - DNA, 20 bp, Synthetic construct
  misc_feature 1..20: note = DNA protospacer sequence
  source 1..20: mol_type = other DNA
ctagactctgtggtattgtg

SEQ ID NO: 88 - DNA, 20 bp, Synthetic construct
  misc_feature 1..20: note = DNA protospacer sequence
  source 1..20: mol_type = other DNA
ccctgctcgtgttacaggcg

SEQ ID NO: 89 - DNA, 20 bp, Synthetic construct
  misc_feature 1..20: note = DNA protospacer sequence
  source 1..20: mol_type = other DNA
taccacagagtctagactcg

SEQ ID NO: 90 - DNA, 20 bp, Synthetic construct
  misc_feature 1..20: note = DNA protospacer sequence
  source 1..20: mol_type = other DNA
tcgcaaaatacctatgggag

SEQ ID NO: 91 - DNA, 20 bp, Synthetic construct
  misc_feature 1..20: note = DNA protospacer sequence
  source 1..20: mol_type = other DNA
gtctgtgccttctcatctgc

SEQ ID NO: 92 - DNA, 20 bp, Synthetic construct
  misc_feature 1..20: note = DNA protospacer sequence
  source 1..20: mol_type = other DNA
acacgtagcgcctcattttg

SEQ ID NO: 93 - DNA, 20 bp, Synthetic construct
  misc_feature 1..20: note = DNA protospacer sequence
  source 1..20: mol_type = other DNA
ttggggttgaggtcccaatc

SEQ ID NO: 94 - DNA, 20 bp, Synthetic construct
  misc_feature 1..20: note = DNA protospacer sequence
  source 1..20: mol_type = other DNA
ccccgagacgggtcgtccgc

SEQ ID NO: 95 - DNA, 20 bp, Synthetic construct
  misc_feature 1..20: note = DNA protospacer sequence
  source 1..20: mol_type = other DNA
cctacgaaccactgaacaaa

SEQ ID NO: 96 - DNA, 20 bp, Synthetic construct
  misc_feature 1..20: note = DNA protospacer sequence
  source 1..20: mol_type = other DNA
ttacatactctgtggaaggc

SEQ ID NO: 97 - DNA, 20 bp, Synthetic construct
  misc_feature 1..20: note = DNA protospacer sequence
  source 1..20: mol_type = other DNA
acctcctttccatggctgct

SEQ ID NO: 98 - DNA, 20 bp, Synthetic construct
  misc_feature 1..20: note = DNA protospacer sequence
  source 1..20: mol_type = other DNA
gttatcgctggatgtgtctg

SEQ ID NO: 99 - DNA, 20 bp, Synthetic construct
  misc_feature 1..20: note = DNA protospacer sequence
  source 1..20: mol_type = other DNA
aacatgagatgattaggcag

SEQ ID NO: 100 - DNA, 20 bp, Synthetic construct
  misc_feature 1..20: note = DNA protospacer sequence
  source 1..20: mol_type = other DNA
acttctctcaattttctagg

SEQ ID NO: 101 - DNA, 20 bp, Synthetic construct
  misc_feature 1..20: note = DNA protospacer sequence
  source 1..20: mol_type = other DNA
cactttctcgccaacttaca

SEQ ID NO: 102 - DNA, 20 bp, Synthetic construct
  misc_feature 1..20: note = DNA protospacer sequence
  source 1..20: mol_type = other DNA
cataaggtgggaaactttac

SEQ ID NO: 103 - DNA, 20 bp, Synthetic construct
  misc_feature 1..20: note = DNA protospacer sequence
  source 1..20: mol_type = other DNA
ccaaacctcgaaaaggcatg

SEQ ID NO: 104 - DNA, 20 bp, Synthetic construct
  misc_feature 1..20: note = DNA protospacer sequence
  source 1..20: mol_type = other DNA
atagaaggaaagaagtcaga

SEQ ID NO: 105 - DNA, 20 bp, Synthetic construct
  misc_feature 1..20: note = DNA protospacer sequence
  source 1..20: mol_type = other DNA
gctgctccttttacacaatg

SEQ ID NO: 106 - DNA, 20 bp, Synthetic construct
  misc_feature 1..20: note = DNA protospacer sequence
  source 1..20: mol_type = other DNA
gaagcgaagtgcacacggtc

SEQ ID NO: 107 - DNA, 20 bp, Synthetic construct
  misc_feature 1..20: note = DNA protospacer sequence
  source 1..20: mol_type = other DNA
ggatcatcaaccaccagcac

SEQ ID NO: 108 - DNA, 20 bp, Synthetic construct
  misc_feature 1..20: note = DNA protospacer sequence
  source 1..20: mol_type = other DNA
gagccaagagaaacggactg

SEQ ID NO: 109 - DNA, 20 bp, Synthetic construct
  misc_feature 1..20: note = DNA protospacer sequence
  source 1..20: mol_type = other DNA
cttcacctctgcacgtcgca

SEQ ID NO: 110 - DNA, 20 bp, Synthetic construct
  misc_feature 1..20: note = DNA protospacer sequence
  source 1..20: mol_type = other DNA
acaatgttccggagactcta

SEQ ID NO: 111 - DNA, 20 bp, Synthetic construct
  misc_feature 1..20: note = DNA protospacer sequence
  source 1..20: mol_type = other DNA
tccgcgggattcagcgccga

SEQ ID NO: 112 - DNA, 20 bp, Synthetic construct
  misc_feature 1..20: note = DNA protospacer sequence
  source 1..20: mol_type = other DNA
ttaatgagtgggaggagttg

SEQ ID NO: 113 - DNA, 20 bp, Synthetic construct
  misc_feature 1..20: note = DNA protospacer sequence
  source 1..20: mol_type = other DNA
ccaactcaaacaatccagat

SEQ ID NO: 114 - DNA, 20 bp, Synthetic construct
  misc_feature 1..20: note = DNA protospacer sequence
  source 1..20: mol_type = other DNA
gctgccaactggatcctgcg

SEQ ID NO: 115 - DNA, 20 bp, Synthetic construct
  misc_feature 1..20: note = DNA protospacer sequence
  source 1..20: mol_type = other DNA
agtctttgaagtatgcctca

SEQ ID NO: 116 - DNA, 20 bp, Synthetic construct
  misc_feature 1..20: note = DNA protospacer sequence
  source 1..20: mol_type = other DNA
tcctgactgccgattggtgg

SEQ ID NO: 117 - DNA, 20 bp, Synthetic construct
  misc_feature 1..20: note = DNA protospacer sequence
  source 1..20: mol_type = other DNA
tcttgtcctccaatttgtcc

SEQ ID NO: 118 - DNA, 20 bp, Synthetic construct
  misc_feature 1..20: note = DNA protospacer sequence
  source 1..20: mol_type = other DNA
cgataaccaggacaaattgg

SEQ ID NO: 119 - DNA, 20 bp, Synthetic construct
  misc_feature 1..20: note = DNA protospacer sequence
  source 1..20: mol_type = other DNA
atttggaagatccagcatcc

SEQ ID NO: 120 - DNA, 20 bp, Synthetic construct
  misc_feature 1..20: note = DNA protospacer sequence
  source 1..20: mol_type = other DNA
ctgtttggctttcagttata

SEQ ID NO: 121 - DNA, 20 bp, Synthetic construct
  misc_feature 1..20: note = DNA protospacer sequence
  source 1..20: mol_type = other DNA
ctcctcctgcctccaccaat

SEQ ID NO: 122 - DNA, 20 bp, Synthetic construct
  misc_feature 1..20: note = DNA protospacer sequence
  source 1..20: mol_type = other DNA
gtcatcctcaggccatgcag

SEQ ID NO: 123 - DNA, 20 bp, Synthetic construct
  misc_feature 1..20: note = DNA protospacer sequence
  source 1..20: mol_type = other DNA
ctgccgttccggccgaccac

SEQ ID NO: 124 - DNA, 20 bp, Synthetic construct
  misc_feature 1..20: note = DNA protospacer sequence
  source 1..20: mol_type = other DNA
ccttcctgactgccgattgg

SEQ ID NO: 125 - DNA, 20 bp, Synthetic construct
  misc_feature 1..20: note = DNA protospacer sequence
  source 1..20: mol_type = other DNA
acctgcacgactcctgctca

SEQ ID NO: 126 - DNA, 20 bp, Synthetic construct
  misc_feature 1..20: note = DNA protospacer sequence
  source 1..20: mol_type = other DNA
ggcctgtattttcctgctgg

SEQ ID NO: 127 - DNA, 20 bp, Synthetic construct
  misc_feature 1..20: note = DNA protospacer sequence
  source 1..20: mol_type = other DNA
aacatagaggttccttgagc

SEQ ID NO: 128 - DNA, 20 bp, Synthetic construct
  misc_feature 1..20: note = DNA protospacer sequence
  source 1..20: mol_type = other DNA
tgccgttccggccgaccacg

SEQ ID NO: 129 - DNA, 20 bp, Synthetic construct
  misc_feature 1..20: note = DNA protospacer sequence
  source 1..20: mol_type = other DNA
ataggccatcagcgcatgcg

SEQ ID NO: 130 - DNA, 20 bp, Synthetic construct
  misc_feature 1..20: note = DNA protospacer sequence
  source 1..20: mol_type = other DNA
gcctccaccaatcggcagtc

SEQ ID NO: 131 - DNA, 20 bp, Synthetic construct
  misc_feature 1..20: note = DNA protospacer sequence
  source 1..20: mol_type = other DNA
gtcctttgtttacgtcccgt

SEQ ID NO: 132 - DNA, 20 bp, Synthetic construct
  misc_feature 1..20: note = DNA protospacer sequence
  source 1..20: mol_type = other DNA
tgggaacaagagctacagca

SEQ ID NO: 133 - DNA, 20 bp, Synthetic construct
  misc_feature 1..20: note = DNA protospacer sequence
  source 1..20: mol_type = other DNA
ctgtaaacaggcctattgat

SEQ ID NO: 134 - DNA, 20 bp, Synthetic construct
  misc_feature 1..20: note = DNA protospacer sequence
  source 1..20: mol_type = other DNA
gtcgcagaagatctcaatct

SEQ ID NO: 135 - DNA, 20 bp, Synthetic construct
  misc_feature 1..20: note = DNA protospacer sequence
  source 1..20: mol_type = other DNA
ctgccttcctgactgccgat

SEQ ID NO: 136 - DNA, 20 bp, Synthetic construct
  misc_feature 1..20: note = DNA protospacer sequence
  source 1..20: mol_type = other DNA
actactaattccctggatgc

SEQ ID NO: 137 - DNA, 20 bp, Synthetic construct
  misc_feature 1..20: note = DNA protospacer sequence
  source 1..20: mol_type = other DNA
cacatttcttgccttacttt

SEQ ID NO: 138 - DNA, 20 bp, Synthetic construct
  misc_feature 1..20: note = DNA protospacer sequence
  source 1..20: mol_type = other DNA
ggatgactgtctcttagagg

SEQ ID NO: 139 - DNA, 20 bp, Synthetic construct
  misc_feature 1..20: note = DNA protospacer sequence
  source 1..20: mol_type = other DNA
gctatgcctcatcttcttgt

SEQ ID NO: 140 - DNA, 20 bp, Synthetic construct
  misc_feature 1..20: note = DNA protospacer sequence
  source 1..20: mol_type = other DNA
cccgtcggcgctgaatcccg

SEQ ID NO: 141 - DNA, 20 bp, Synthetic construct
  misc_feature 1..20: note = DNA protospacer sequence
  source 1..20: mol_type = other DNA
tagtattccttggactcata

SEQ ID NO: 142 - DNA, 20 bp, Synthetic construct
  misc_feature 1..20: note = DNA protospacer sequence
  source 1..20: mol_type = other DNA
aggtaggagcgggagcattc

SEQ ID NO: 143 - DNA, 20 bp, Synthetic construct
  misc_feature 1..20: note = DNA protospacer sequence
  source 1..20: mol_type = other DNA
tcttttggggtggagccctc

SEQ ID NO: 144 - DNA, 20 bp, Synthetic construct
  misc_feature 1..20: note = DNA protospacer sequence
  source 1..20: mol_type = other DNA
tcagtatgccctgagcctga

SEQ ID NO: 145 - DNA, 20 bp, Synthetic construct
  misc_feature 1..20: note = DNA protospacer sequence
  source 1..20: mol_type = other DNA
tttaatgagtgggaggagtt

SEQ ID NO: 146 - DNA, 20 bp, Synthetic construct
  misc_feature 1..20: note = DNA protospacer sequence
  source 1..20: mol_type = other DNA
ctccctcgcctcgcagacga

SEQ ID NO: 147 - DNA, 20 bp, Synthetic construct
  misc_feature 1..20: note = DNA protospacer sequence
  source 1..20: mol_type = other DNA
gataagataggggcatttgg

SEQ ID NO: 148 - DNA, 20 bp, Synthetic construct
  misc_feature 1..20: note = DNA protospacer sequence
  source 1..20: mol_type = other DNA
ccgcgggattcagcgccgac

SEQ ID NO: 149 - DNA, 20 bp, Synthetic construct
  misc_feature 1..20: note = DNA protospacer sequence
  source 1..20: mol_type = other DNA
cagcgataaccaggacaaat

SEQ ID NO: 150 - DNA, 20 bp, Synthetic construct
  misc_feature 1..20: note = DNA protospacer sequence
  source 1..20: mol_type = other DNA
caggtaggagtgggagcatt

SEQ ID NO: 151 - DNA, 20 bp, Synthetic construct
  misc_feature 1..20: note = DNA protospacer sequence
  source 1..20: mol_type = other DNA
gtttaatgagtgggaggagt

SEQ ID NO: 152 - DNA, 20 bp, Synthetic construct
  misc_feature 1..20: note = DNA protospacer sequence
  source 1..20: mol_type = other DNA
tggtgagtgattggaggttg

SEQ ID NO: 153 - DNA, 20 bp, Synthetic construct
  misc_feature 1..20: note = DNA protospacer sequence
  source 1..20: mol_type = other DNA
taatgagtgggaggagttgg

SEQ ID NO: 154 - DNA, 20 bp, Synthetic construct
  misc_feature 1..20: note = DNA protospacer sequence
  source 1..20: mol_type = other DNA
actacatgttctggataata

SEQ ID NO: 155 - DNA, 20 bp, Synthetic construct
  misc_feature 1..20: note = DNA protospacer sequence
  source 1..20: mol_type = other DNA
ggcatagcagcaggatgaag

SEQ ID NO: 156 - DNA, 20 bp, Synthetic construct
  misc_feature 1..20: note = DNA protospacer sequence
  source 1..20: mol_type = other DNA
gttgataagataggggcatt

SEQ ID NO: 157 - DNA, 20 bp, Synthetic construct
  misc_feature 1..20: note = DNA protospacer sequence
  source 1..20: mol_type = other DNA
tcaacgaattgtgggtcttt

SEQ ID NO: 158 - DNA, 20 bp, Synthetic construct
  misc_feature 1..20: note = DNA protospacer sequence
  source 1..20: mol_type = other DNA
tatggatgatgtggtattgg

SEQ ID NO: 159 - DNA, 20 bp, Synthetic construct
  misc_feature 1..20: note = DNA protospacer sequence
  source 1..20: mol_type = other DNA
caacgaattgtgggtctttt

SEQ ID NO: 160 - DNA, 20 bp, Synthetic construct
  misc_feature 1..20: note = DNA protospacer sequence
  source 1..20: mol_type = other DNA
catttgttcagtggttcgta

SEQ ID NO: 161 - DNA, 20 bp, Synthetic construct
  misc_feature 1..20: note = DNA protospacer sequence
  source 1..20: mol_type = other DNA
cgtctaacaacagtagtttc

SEQ ID NO: 162 - DNA, 20 bp, Synthetic construct
  misc_feature 1..20: note = DNA protospacer sequence
  source 1..20: mol_type = other DNA
tgcctgagtgctgtatggtg

SEQ ID NO: 163 - DNA, 20 bp, Synthetic construct
  misc_feature 1..20: note = DNA protospacer sequence
  source 1..20: mol_type = other DNA
gccccgagacgggtcgtccg

SEQ ID NO: 164 - DNA, 20 bp, Synthetic construct
  misc_feature 1..20: note = DNA protospacer sequence
  source 1..20: mol_type = other DNA
gactgccgattggtggaggc

SEQ ID NO: 165 - DNA, 20 bp, Synthetic construct
  misc_feature 1..20: note = DNA protospacer sequence
  source 1..20: mol_type = other DNA
tatatggatgatgtggtatt

SEQ ID NO: 166 - DNA, 20 bp, Synthetic construct
  misc_feature 1..20: note = DNA protospacer sequence
  source 1..20: mol_type = other DNA
cttgagtatttggtgtcttt

SEQ ID NO: 167 - DNA, 20 bp, Synthetic construct
  misc_feature 1..20: note = DNA protospacer sequence
  source 1..20: mol_type = other DNA
gatctggtgggcgttcacgg

SEQ ID NO: 168 - DNA, 20 bp, Synthetic construct
  misc_feature 1..20: note = DNA protospacer sequence
  source 1..20: mol_type = other DNA
agactgggaggagttggggg

SEQ ID NO: 169 - DNA, 20 bp, Synthetic construct
  misc_feature 1..20: note = DNA protospacer sequence
  source 1..20: mol_type = other DNA
agtcctcttatgtaagacct

SEQ ID NO: 170 - DNA, 20 bp, Synthetic construct
  misc_feature 1..20: note = DNA protospacer sequence
  source 1..20: mol_type = other DNA
ctcaagatgttgtacagact

SEQ ID NO: 171 - DNA, 20 bp, Synthetic construct
  misc_feature 1..20: note = DNA protospacer sequence
  source 1..20: mol_type = other DNA
gggaacaagagctacagcat

SEQ ID NO: 172 - DNA, 20 bp, Synthetic construct
  misc_feature 1..20: note = DNA protospacer sequence
  source 1..20: mol_type = other DNA
tcgcagaagatctcaatctc

SEQ ID NO: 173 - DNA, 20 bp, Synthetic construct
  misc_feature 1..20: note = DNA protospacer sequence
  source 1..20: mol_type = other DNA
ggggtggagccctcaggctc

SEQ ID NO: 174 - DNA, 20 bp, Synthetic construct
  misc_feature 1..20: note = DNA protospacer sequence
  source 1..20: mol_type = other DNA
tattccttggactcataagg

SEQ ID NO: 175 - DNA, 20 bp, Synthetic construct
  misc_feature 1..20: note = DNA protospacer sequence
  source 1..20: mol_type = other DNA
tctaagagacagtcatcctc

SEQ ID NO: 176 - DNA, 20 bp, Synthetic construct
  misc_feature 1..20: note = DNA protospacer sequence
  source 1..20: mol_type = other DNA
caactcaaacaatccagatt

SEQ ID NO: 177 - DNA, 20 bp, Synthetic construct
  misc_feature 1..20: note = DNA protospacer sequence
  source 1..20: mol_type = other DNA
aaacaaaggacgtcccgcgc

SEQ ID NO: 178 - DNA, 20 bp, Synthetic construct
  misc_feature 1..20: note = DNA protospacer sequence
  source 1..20: mol_type = other DNA
ctgccaactggatcctgcgc

SEQ ID NO: 179 - DNA, 20 bp, Synthetic construct
  misc_feature 1..20: note = DNA protospacer sequence
  source 1..20: mol_type = other DNA
gaagctccaaattctttata

SEQ ID NO: 180 - DNA, 20 bp, Synthetic construct
  misc_feature 1..20: note = DNA protospacer sequence
  source 1..20: mol_type = other DNA
gtcagtatgccctgagcctg

SEQ ID NO: 181 - DNA, 20 bp, Synthetic construct
  misc_feature 1..20: note = DNA protospacer sequence
  source 1..20: mol_type = other DNA
tttcccaccttatgagtcca

SEQ ID NO: 182 - DNA, 20 bp, Synthetic construct
  misc_feature 1..20: note = DNA protospacer sequence
  source 1..20: mol_type = other DNA
acaagaggttggtgagtgat

SEQ ID NO: 183 - DNA, 20 bp, Synthetic construct
  misc_feature 1..20: note = DNA protospacer sequence
  source 1..20: mol_type = other DNA
gaaagcccaagatgatggga

SEQ ID NO: 184 - DNA, 20 bp, Synthetic construct
  misc_feature 1..20: note = DNA protospacer sequence
  source 1..20: mol_type = other DNA
aggttccacgcatgcgctga

SEQ ID NO: 185 - DNA, 20 bp, Synthetic construct
  misc_feature 1..20: note = DNA protospacer sequence
  source 1..20: mol_type = other DNA
ttggtgagtgattggaggtt

SEQ ID NO: 186 - DNA, 20 bp, Synthetic construct
  misc_feature 1..20: note = DNA protospacer sequence
  source 1..20: mol_type = other DNA
agagctacagcatgggaggt

SEQ ID NO: 187 - DNA, 20 bp, Synthetic construct
  misc_feature 1..20: note = DNA protospacer sequence
  source 1..20: mol_type = other DNA
atatggatgatgtggtattg

SEQ ID NO: 188 - DNA, 20 bp, Synthetic construct
  misc_feature 1..20: note = DNA protospacer sequence
  source 1..20: mol_type = other DNA
ccatttgttcagtggttcgt

SEQ ID NO: 189 - DNA, 20 bp, Synthetic construct
  misc_feature 1..20: note = DNA protospacer sequence
  source 1..20: mol_type = other DNA
ttatatggatgatgtggtat

SEQ ID NO: 190 - DNA, 20 bp, Synthetic construct
  misc_feature 1..20: note = DNA protospacer sequence
  source 1..20: mol_type = other DNA
ggagtgggagcattcgggcc

SEQ ID NO: 191 - DNA, 20 bp, Synthetic construct
  misc_feature 1..20: note = DNA protospacer sequence
  source 1..20: mol_type = other DNA
atttggtgtcttttggagtg

SEQ ID NO: 192 - DNA, 20 bp, Synthetic construct
  misc_feature 1..20: note = DNA protospacer sequence
  source 1..20: mol_type = other DNA
cacagaaaggccttgtaagt

SEQ ID NO: 193 - DNA, 20 bp, Synthetic construct
  misc_feature 1..20: note = DNA protospacer sequence
  source 1..20: mol_type = other DNA
accaattttcttttgtcttt

SEQ ID NO: 194 - DNA, 20 bp, Synthetic construct
  misc_feature 1..20: note = DNA protospacer sequence
  source 1..20: mol_type = other DNA
aggttaatggtctttgtact

SEQ ID NO: 195 - DNA, 20 bp, Synthetic construct
  misc_feature 1..20: note = DNA protospacer sequence
  source 1..20: mol_type = other DNA
taccaattttcttttgtctt

SEQ ID NO: 196 - RNA, 20 nt, Synthetic construct
  misc_feature 1..20: note = RNA protospacer sequence
  source 1..20: mol_type = other RNA
ccctatcttatcaacacttc

SEQ ID NO: 197 - RNA, 20 nt, Synthetic construct
  misc_feature 1..20: note = RNA protospacer sequence
  source 1..20: mol_type = other RNA
gcagaggtgaaaaagttgca

SEQ ID NO: 198 - RNA, 20 nt, Synthetic construct
  misc_feature 1..20: note = RNA protospacer sequence
  source 1..20: mol_type = other RNA
tggacttctctcaattttct

SEQ ID NO: 199 - RNA, 20 nt, Synthetic construct
  misc_feature 1..20: note = RNA protospacer sequence
  source 1..20: mol_type = other RNA
accccgcctgtaacacgagc

SEQ ID NO: 200 - RNA, 20 nt, Synthetic construct
  misc_feature 1..20: note = RNA protospacer sequence
  source 1..20: mol_type = other RNA
cccgcctgtaacacgagcag

SEQ ID NO: 201 - RNA, 20 nt, Synthetic construct
  misc_feature 1..20: note = RNA protospacer sequence
  source 1..20: mol_type = other RNA
caccacgagtctagactctg

SEQ ID NO: 202 - RNA, 20 nt, Synthetic construct
  misc_feature 1..20: note = RNA protospacer sequence
  source 1..20: mol_type = other RNA
gaggtgaagcgaagtgcaca

SEQ ID NO: 203 - RNA, 20 nt, Synthetic construct
  misc_feature 1..20: note = RNA protospacer sequence
  source 1..20: mol_type = other RNA
ccggaagtgttgataagata

SEQ ID NO: 204 - RNA, 20 nt, Synthetic construct
  misc_feature 1..20: note = RNA protospacer sequence
  source 1..20: mol_type = other RNA
agaagatgaggcatagcagc

SEQ ID NO: 205 - RNA, 20 nt, Synthetic construct
  misc_feature 1..20: note = RNA protospacer sequence
  source 1..20: mol_type = other RNA
tccgcagtatggatcggcag

SEQ ID NO: 206 - RNA, 20 nt, Synthetic construct
  misc_feature 1..20: note = RNA protospacer sequence
  source 1..20: mol_type = other RNA
ggacttctctcaattttcta

SEQ ID NO: 207 - RNA, 20 nt, Synthetic construct
  misc_feature 1..20: note = RNA protospacer sequence
  source 1..20: mol_type = other RNA
ccacccaaggcacagcttgg

SEQ ID NO: 208 - RNA, 20 nt, Synthetic construct
  misc_feature 1..20: note = RNA protospacer sequence
  source 1..20: mol_type = other RNA
agagaggtgcgccccgtggt

SEQ ID NO: 209 - RNA, 20 nt, Synthetic construct
  misc_feature 1..20: note = RNA protospacer sequence
  source 1..20: mol_type = other RNA
gattgagatcttctgcgacg

SEQ ID NO: 210 - RNA, 20 nt, Synthetic construct
  misc_feature 1..20: note = RNA protospacer sequence
  source 1..20: mol_type = other RNA
caagcctccaagctgtgcct

SEQ ID NO: 211 - RNA, 20 nt, Synthetic construct
  misc_feature 1..20: note = RNA protospacer sequence
  source 1..20: mol_type = other RNA
ggcgagggagttcttcttct

SEQ ID NO: 212 - RNA, 20 nt, Synthetic construct
  misc_feature 1..20: note = RNA protospacer sequence
  source 1..20: mol_type = other RNA
tccggaagtgttgataagat

SEQ ID NO: 213 - RNA, 20 nt, Synthetic construct
  misc_feature 1..20: note = RNA protospacer sequence
  source 1..20: mol_type = other RNA
aagccacccaaggcacagct

SEQ ID NO: 214 - RNA, 20 nt, Synthetic construct
  misc_feature 1..20: note = RNA protospacer sequence
  source 1..20: mol_type = other RNA
cctccaagctgtgccttggg

SEQ ID NO: 215 - RNA, 20 nt, Synthetic construct
  misc_feature 1..20: note = RNA protospacer sequence
  source 1..20: mol_type = other RNA
gtaaagagaggtgcgccccg

SEQ ID NO: 216 - RNA, 20 nt, Synthetic construct
  misc_feature 1..20: note = RNA protospacer sequence
  source 1..20: mol_type = other RNA
ggcagatgagaaggcacaga

SEQ ID NO: 217 - RNA, 20 nt, Synthetic construct
  misc_feature 1..20: note = RNA protospacer sequence
  source 1..20: mol_type = other RNA
aggagttccgcagtatggat

SEQ ID NO: 218 - RNA, 20 nt, Synthetic construct
  misc_feature 1..20: note = RNA protospacer sequence
  source 1..20: mol_type = other RNA
gctgtgccttgggtggcttt

SEQ ID NO: 219 - RNA, 20 nt, Synthetic construct
  misc_feature 1..20: note = RNA protospacer sequence
  source 1..20: mol_type = other RNA
acccctgctcgtgttacagg

SEQ ID NO: 220 - RNA, 20 nt, Synthetic construct
  misc_feature 1..20: note = RNA protospacer sequence
  source 1..20: mol_type = other RNA
cggaagtgttgataagatag

SEQ ID NO: 221 - RNA, 20 nt, Synthetic construct
  misc_feature 1..20: note = RNA protospacer sequence
  source 1..20: mol_type = other RNA
cctgctggtggctccagttc

SEQ ID NO: 222 - RNA, 20 nt, Synthetic construct
  misc_feature 1..20: note = RNA protospacer sequence
  source 1..20: mol_type = other RNA
cgagggagttcttcttctag

SEQ ID NO: 223 - RNA, 20 nt, Synthetic construct
  misc_feature 1..20: note = RNA protospacer sequence
  source 1..20: mol_type = other RNA
ggggcgcacctctctttacg

SEQ ID NO: 224 - RNA, 20 nt, Synthetic construct
  misc_feature 1..20: note = RNA protospacer sequence
  source 1..20: mol_type = other RNA
agcttggaggcttgaacagt

SEQ ID NO: 225 - RNA, 20 nt, Synthetic construct
  misc_feature 1..20: note = RNA protospacer sequence
  source 1..20: mol_type = other RNA
aagcctccaagctgtgcctt

SEQ ID NO: 226 - RNA, 20 nt, Synthetic construct
  misc_feature 1..20: note = RNA protospacer sequence
  source 1..20: mol_type = other RNA
cccctgctcgtgttacaggc

SEQ ID NO: 227 - RNA, 20 nt, Synthetic construct
  misc_feature 1..20: note = RNA protospacer sequence
  source 1..20: mol_type = other RNA
gcgagggagttcttcttcta

SEQ ID NO: 228 - RNA, 20 nt, Synthetic construct
  misc_feature 1..20: note = RNA protospacer sequence
  source 1..20: mol_type = other RNA
tactagtgccatttgttcag

SEQ ID NO: 229 - RNA, 20 nt, Synthetic construct
  misc_feature 1..20: note = RNA protospacer sequence
  source 1..20: mol_type = other RNA
gacttctctcaattttctag

SEQ ID NO: 230 - RNA, 20 nt, Synthetic construct
  misc_feature 1..20: note = RNA protospacer sequence
  source 1..20: mol_type = other RNA
attgacccgtataaagaatt

SEQ ID NO: 231 - RNA, 20 nt, Synthetic construct
  misc_feature 1..20: note = RNA protospacer sequence
  source 1..20: mol_type = other RNA
acccaaagacaaaagaaaat

SEQ ID NO: 232 - RNA, 20 nt, Synthetic construct
  misc_feature 1..20: note = RNA protospacer sequence
  source 1..20: mol_type = other RNA
gtcctcttatgtaagacctt

SEQ ID NO: 233 - RNA, 20 nt, Synthetic construct
  misc_feature 1..20: note = RNA protospacer sequence
  source 1..20: mol_type = other RNA
tgatcgggaaagaatcccag

SEQ ID NO: 234 - RNA, 20 nt, Synthetic construct
  misc_feature 1..20: note = RNA protospacer sequence
  source 1..20: mol_type = other RNA
tttgctgacgcaacccccac

SEQ ID NO: 235 - RNA, 20 nt, Synthetic construct
  misc_feature 1..20: note = RNA protospacer sequence
  source 1..20: mol_type = other RNA
atgaatctagccacctgggt

SEQ ID NO: 236 - RNA, 20 nt, Synthetic construct
  misc_feature 1..20: note = RNA protospacer sequence
  source 1..20: mol_type = other RNA
ggtctccatgcgacgtgcag

SEQ ID NO: 237 - RNA, 20 nt, Synthetic construct
  misc_feature 1..20: note = RNA protospacer sequence
  source 1..20: mol_type = other RNA
ggactgaggcccactcccat

SEQ ID NO: 238 - RNA, 20 nt, Synthetic construct
  misc_feature 1..20: note = RNA protospacer sequence
  source 1..20: mol_type = other RNA
cacagagtctagactcgtgg

SEQ ID NO: 239 - RNA, 20 nt, Synthetic construct
  misc_feature 1..20: note = RNA protospacer sequence
  source 1..20: mol_type = other RNA
gaagaaccaacaagaagatg

SEQ ID NO: 240 - RNA, 20 nt, Synthetic construct
  misc_feature 1..20: note = RNA protospacer sequence
  source 1..20: mol_type = other RNA
acacggtccggcagatgaga

SEQ ID NO: 241 - RNA, 20 nt, Synthetic construct
  misc_feature 1..20: note = RNA protospacer sequence
  source 1..20: mol_type = other RNA
gacatgaacatgagatgatt

SEQ ID NO: 242 - RNA, 20 nt, Synthetic construct
  misc_feature 1..20: note = RNA protospacer sequence
  source 1..20: mol_type = other RNA
gcagcacagcctagcagcca

SEQ ID NO: 243 - RNA, 20 nt, Synthetic construct
  misc_feature 1..20: note = RNA protospacer sequence
  source 1..20: mol_type = other RNA
tcctggaattagaggacaaa

SEQ ID NO: 244 - RNA, 20 nt, Synthetic construct
  misc_feature 1..20: note = RNA protospacer sequence
  source 1..20: mol_type = other RNA
gtcttacataagaggactct

SEQ ID NO: 245 - RNA, 20 nt, Synthetic construct
  misc_feature 1..20: note = RNA protospacer sequence
  source 1..20: mol_type = other RNA
ttgtgggtcaccatattctt

SEQ ID NO: 246 - RNA, 20 nt, Synthetic construct
  misc_feature 1..20: note = RNA protospacer sequence
  source 1..20: mol_type = other RNA
cgcaaaatacctatgggagt

SEQ ID NO: 247 - RNA, 20 nt, Synthetic construct
  misc_feature 1..20: note = RNA protospacer sequence
  source 1..20: mol_type = other RNA
gggttgcgtcagcaaacact

SEQ ID NO: 248 - RNA, 20 nt, Synthetic construct
  misc_feature 1..20: note = RNA protospacer sequence
  source 1..20: mol_type = other RNA
agctcttgttcccaagaata

SEQ ID NO: 249 - RNA, 20 nt, Synthetic construct
  misc_feature 1..20: note = RNA protospacer sequence
  source 1..20: mol_type = other RNA
tgacatactttccaatcaat

SEQ ID NO: 250 - RNA, 20 nt, Synthetic construct
  misc_feature 1..20: note = RNA protospacer sequence
  source 1..20: mol_type = other RNA
cagatgagaaggcacagacg

SEQ ID NO: 251 - RNA, 20 nt, Synthetic construct
  misc_feature 1..20: note = RNA protospacer sequence
  source 1..20: mol_type = other RNA
ccccgcctgtaacacgagca

SEQ ID NO: 252 - RNA, 20 nt, Synthetic construct
  misc_feature 1..20: note = RNA protospacer sequence
  source 1..20: mol_type = other RNA
gggtggagccctcaggctca

SEQ ID NO: 253 - RNA, 20 nt, Synthetic construct
  misc_feature 1..20: note = RNA protospacer sequence
  source 1..20: mol_type = other RNA
attccttggactcataaggt

SEQ ID NO: 254 - RNA, 20 nt, Synthetic construct
  misc_feature 1..20: note = RNA protospacer sequence
  source 1..20: mol_type = other RNA
tttgtgggtcaccatattct

SEQ ID NO: 255 - RNA, 20 nt, Synthetic construct
  misc_feature 1..20: note = RNA protospacer sequence
  source 1..20: mol_type = other RNA
gtgaaaaagttgcatggtgc

SEQ ID NO: 256 - RNA, 20 nt, Synthetic construct
  misc_feature 1..20: note = RNA protospacer sequence
  source 1..20: mol_type = other RNA
cctgaactggagccaccagc

SEQ ID NO: 257 - RNA, 20 nt, Synthetic construct
  misc_feature 1..20: note = RNA protospacer sequence
  source 1..20: mol_type = other RNA
tcctctgccgatccatactg

SEQ ID NO: 258 - RNA, 20 nt, Synthetic construct
  misc_feature 1..20: note = RNA protospacer sequence
  source 1..20: mol_type = other RNA
cggctaggagttccgcagta

SEQ ID NO: 259 - RNA, 20 nt, Synthetic construct
  misc_feature 1..20: note = RNA protospacer sequence
  source 1..20: mol_type = other RNA
aatgtcaacgaccgaccttg

SEQ ID NO: 260 - RNA, 20 nt, Synthetic construct
  misc_feature 1..20: note = RNA protospacer sequence
  source 1..20: mol_type = other RNA
gaccttcgtctgcgaggcga

SEQ ID NO: 261 - RNA, 20 nt, Synthetic construct
  misc_feature 1..20: note = RNA protospacer sequence
  source 1..20: mol_type = other RNA
gttgccgggcaacggggtaa

SEQ ID NO: 262 - RNA, 20 nt, Synthetic construct
  misc_feature 1..20: note = RNA protospacer sequence
  source 1..20: mol_type = other RNA
gattgagaccttcgtctgcg

SEQ ID NO: 263 - RNA, 20 nt, Synthetic construct
  misc_feature 1..20: note = RNA protospacer sequence
  source 1..20: mol_type = other RNA
aggacccctgctcgtgttac

SEQ ID NO: 264 - RNA, 20 nt, Synthetic construct
  misc_feature 1..20: note = RNA protospacer sequence
  source 1..20: mol_type = other RNA
tttgaagtatgcctcaaggt

SEQ ID NO: 265 - RNA, 20 nt, Synthetic construct
  misc_feature 1..20: note = RNA protospacer sequence
  source 1..20: mol_type = other RNA
ccgcttgttttgctcgcagc

SEQ ID NO: 266 - RNA, 20 nt, Synthetic construct
  misc_feature 1..20: note = RNA protospacer sequence
  source 1..20: mol_type = other RNA
tgctaggctgtgctgccaac

SEQ ID NO: 267 - RNA, 20 nt, Synthetic construct
  misc_feature 1..20: note = RNA protospacer sequence
  source 1..20: mol_type = other RNA
tgccgattggtggaggcagg

SEQ ID NO: 268 - RNA, 20 nt, Synthetic construct
  misc_feature 1..20: note = RNA protospacer sequence
  source 1..20: mol_type = other RNA
tctttgtactaggaggctgt

SEQ ID NO: 269 - RNA, 20 nt, Synthetic construct
  misc_feature 1..20: note = RNA protospacer sequence
  source 1..20: mol_type = other RNA
cgtcccgcgcaggatccagt

SEQ ID NO: 270 - RNA, 20 nt, Synthetic construct
  misc_feature 1..20: note = RNA protospacer sequence
  source 1..20: mol_type = other RNA
aaagcccaagatgatgggat

SEQ ID NO: 271 - RNA, 20 nt, Synthetic construct
  misc_feature 1..20: note = RNA protospacer sequence
  source 1..20: mol_type = other RNA
gcagatgagaaggcacagac

SEQ ID NO: 272 - RNA, 20 nt, Synthetic construct
  misc_feature 1..20: note = RNA protospacer sequence
  source 1..20: mol_type = other RNA
cgattggtggaggcaggagg

SEQ ID NO: 273 - RNA, 20 nt, Synthetic construct
  misc_feature 1..20: note = RNA protospacer sequence
  source 1..20: mol_type = other RNA
aggaggctgtaggcataaat

SEQ ID NO: 274 - RNA, 20 nt, Synthetic construct
  misc_feature 1..20: note = RNA protospacer sequence
  source 1..20: mol_type = other RNA
ccatgccccaaagccaccca

SEQ ID NO: 275 - RNA, 20 nt, Synthetic construct
  misc_feature 1..20: note = RNA protospacer sequence
  source 1..20: mol_type = other RNA
aggttggggactgcgaattt

SEQ ID NO: 276 - RNA, 20 nt, Synthetic construct
  misc_feature 1..20: note = RNA protospacer sequence
  source 1..20: mol_type = other RNA
agaccttcgtctgcgaggcg

SEQ ID NO: 277 - RNA, 20 nt, Synthetic construct
  misc_feature 1..20: note = RNA protospacer sequence
  source 1..20: mol_type = other RNA
cctggaattagaggacaaac

SEQ ID NO: 278 - RNA, 20 nt, Synthetic construct
  misc_feature 1..20: note = RNA protospacer sequence
  source 1..20: mol_type = other RNA
tttcagttatatggatgatg

SEQ ID NO: 279 - RNA, 20 nt, Synthetic construct
  misc_feature 1..20: note = RNA protospacer sequence
  source 1..20: mol_type = other RNA
gtaacacgagcaggggtcct

SEQ ID NO: 280 - RNA, 20 nt, Synthetic construct
  misc_feature 1..20: note = RNA protospacer sequence
  source 1..20: mol_type = other RNA
catcttcttgttggttcttc

SEQ ID NO: 281 - RNA, 20 nt, Synthetic construct
  misc_feature 1..20: note = RNA protospacer sequence
  source 1..20: mol_type = other RNA
cggggagaccgcgtaaagag

SEQ ID NO: 282 - RNA, 20 nt, Synthetic construct
  misc_feature 1..20: note = RNA protospacer sequence
  source 1..20: mol_type = other RNA
ctagactctgtggtattgtg

SEQ ID NO: 283 - RNA, 20 nt, Synthetic construct
  misc_feature 1..20: note = RNA protospacer sequence
  source 1..20: mol_type = other RNA
ccctgctcgtgttacaggcg

SEQ ID NO: 284 - RNA, 20 nt, Synthetic construct
  misc_feature 1..20: note = RNA protospacer sequence
  source 1..20: mol_type = other RNA
taccacagagtctagactcg

SEQ ID NO: 285 - RNA, 20 nt, Synthetic construct
  misc_feature 1..20: note = RNA protospacer sequence
  source 1..20: mol_type = other RNA
tcgcaaaatacctatgggag

SEQ ID NO: 286 - RNA, 20 nt, Synthetic construct
  misc_feature 1..20: note = RNA protospacer sequence
  source 1..20: mol_type = other RNA
gtctgtgccttctcatctgc

SEQ ID NO: 287 - RNA, 20 nt, Synthetic construct
  misc_feature 1..20: note = RNA protospacer sequence
  source 1..20: mol_type = other RNA
acacgtagcgcctcattttg

SEQ ID NO: 288 - RNA, 20 nt, Synthetic construct
  misc_feature 1..20: note = RNA protospacer sequence
  source 1..20: mol_type = other RNA
ttggggttgaggtcccaatc

SEQ ID NO: 289 - RNA, 20 nt, Synthetic construct
  misc_feature 1..20: note = RNA protospacer sequence
  source 1..20: mol_type = other RNA
ccccgagacgggtcgtccgc

SEQ ID NO: 290 - RNA, 20 nt, Synthetic construct
  misc_feature 1..20: note = RNA protospacer sequence
  source 1..20: mol_type = other RNA
cctacgaaccactgaacaaa

SEQ ID NO: 291 - RNA, 20 nt, Synthetic construct
  misc_feature 1..20: note = RNA protospacer sequence
  source 1..20: mol_type = other RNA
ttacatactctgtggaaggc

SEQ ID NO: 292 - RNA, 20 nt, Synthetic construct
  misc_feature 1..20: note = RNA protospacer sequence
  source 1..20: mol_type = other RNA
acctcctttccatggctgct

SEQ ID NO: 293 - RNA, 20 nt, Synthetic construct
  misc_feature 1..20: note = RNA protospacer sequence
  source 1..20: mol_type = other RNA
gttatcgctggatgtgtctg

SEQ ID NO: 294 - RNA, 20 nt, Synthetic construct
  misc_feature 1..20: note = RNA protospacer sequence
  source 1..20: mol_type = other RNA
aacatgagatgattaggcag

SEQ ID NO: 295 - RNA, 20 nt, Synthetic construct
  misc_feature 1..20: note = RNA protospacer sequence
  source 1..20: mol_type = other RNA
acttctctcaattttctagg

SEQ ID NO: 296 - RNA, 20 nt, Synthetic construct
  misc_feature 1..20: note = RNA protospacer sequence
  source 1..20: mol_type = other RNA
cactttctcgccaacttaca

SEQ ID NO: 297 - RNA, 20 nt, Synthetic construct
  misc_feature 1..20: note = RNA protospacer sequence
  source 1..20: mol_type = other RNA
cataaggtgggaaactttac

SEQ ID NO: 298 - RNA, 20 nt, Synthetic construct
  misc_feature 1..20: note = RNA protospacer sequence
  source 1..20: mol_type = other RNA
ccaaacctcgaaaaggcatg

SEQ ID NO: 299 - RNA, 20 nt, Synthetic construct
  misc_feature 1..20: note = RNA protospacer sequence
  source 1..20: mol_type = other RNA
atagaaggaaagaagtcaga

SEQ ID NO: 300 - RNA, 20 nt, Synthetic construct
  misc_feature 1..20: note = RNA protospacer sequence
  source 1..20: mol_type = other RNA
gctgctccttttacacaatg

SEQ ID NO: 301 - RNA, 20 nt, Synthetic construct
  misc_feature 1..20: note = RNA protospacer sequence
  source 1..20: mol_type = other RNA
gaagcgaagtgcacacggtc

SEQ ID NO: 302 - RNA, 20 nt, Synthetic construct
  misc_feature 1..20: note = RNA protospacer sequence
  source 1..20: mol_type = other RNA
ggatcatcaaccaccagcac

SEQ ID NO: 303 - RNA, 20 nt, Synthetic construct
  misc_feature 1..20: note = RNA protospacer sequence
  source 1..20: mol_type = other RNA
gagccaagagaaacggactg

SEQ ID NO: 304 - RNA, 20 nt, Synthetic construct
  misc_feature 1..20: note = RNA protospacer sequence
  source 1..20: mol_type = other RNA
cttcacctctgcacgtcgca

SEQ ID NO: 305 - RNA, 20 nt, Synthetic construct
  misc_feature 1..20: note = RNA protospacer sequence
  source 1..20: mol_type = other RNA
acaatgttccggagactcta

SEQ ID NO: 306 - RNA, 20 nt, Synthetic construct
  misc_feature 1..20: note = RNA protospacer sequence
  source 1..20: mol_type = other RNA
tccgcgggattcagcgccga

SEQ ID NO: 307 - RNA, 20 nt, Synthetic construct
  misc_feature 1..20: note = RNA protospacer sequence
  source 1..20: mol_type = other RNA
ttaatgagtgggaggagttg

SEQ ID NO: 308 - RNA, 20 nt, Synthetic construct
  misc_feature 1..20: note = RNA protospacer sequence
  source 1..20: mol_type = other RNA
ccaactcaaacaatccagat

SEQ ID NO: 309 - RNA, 20 nt, Synthetic construct
  misc_feature 1..20: note = RNA protospacer sequence
  source 1..20: mol_type = other RNA
gctgccaactggatcctgcg

SEQ ID NO: 310 - RNA, 20 nt, Synthetic construct
  misc_feature 1..20: note = RNA protospacer sequence
  source 1..20: mol_type = other RNA
agtctttgaagtatgcctca

SEQ ID NO: 311 - RNA, 20 nt, Synthetic construct
  misc_feature 1..20: note = RNA protospacer sequence
  source 1..20: mol_type = other RNA
tcctgactgccgattggtgg

SEQ ID NO: 312 - RNA, 20 nt, Synthetic construct
  misc_feature 1..20: note = RNA protospacer sequence
  source 1..20: mol_type = other RNA
tcttgtcctccaatttgtcc

SEQ ID NO: 313 - RNA, 20 nt, Synthetic construct
  misc_feature 1..20: note = RNA protospacer sequence
  source 1..20: mol_type = other RNA
cgataaccaggacaaattgg

SEQ ID NO: 314 - RNA, 20 nt, Synthetic construct
  misc_feature 1..20: note = RNA protospacer sequence
  source 1..20: mol_type = other RNA
atttggaagatccagcatcc

SEQ ID NO: 315 - RNA, 20 nt, Synthetic construct
  misc_feature 1..20: note = RNA protospacer sequence
  source 1..20: mol_type = other RNA
ctgtttggctttcagttata

SEQ ID NO: 316 - RNA, 20 nt, Synthetic construct
  misc_feature 1..20: note = RNA protospacer sequence
  source 1..20: mol_type = other RNA
ctcctcctgcctccaccaat

SEQ ID NO: 317 - RNA, 20 nt, Synthetic construct
  misc_feature 1..20: note = RNA protospacer sequence
  source 1..20: mol_type = other RNA
gtcatcctcaggccatgcag

SEQ ID NO: 318 - RNA, 20 nt, Synthetic construct
  misc_feature 1..20: note = RNA protospacer sequence
  source 1..20: mol_type = other RNA
ctgccgttccggccgaccac

SEQ ID NO: 319 - RNA, 20 nt, Synthetic construct
  misc_feature 1..20: note = RNA protospacer sequence
  source 1..20: mol_type = other RNA
ccttcctgactgccgattgg

SEQ ID NO: 320 - RNA, 20 nt, Synthetic construct
  misc_feature 1..20: note = RNA protospacer sequence
  source 1..20: mol_type = other RNA
acctgcacgactcctgctca

SEQ ID NO: 321 - RNA, 20 nt, Synthetic construct
  misc_feature 1..20: note = RNA protospacer sequence
  source 1..20: mol_type = other RNA
ggcctgtattttcctgctgg

SEQ ID NO: 322 - RNA, 20 nt, Synthetic construct
  misc_feature 1..20: note = RNA protospacer sequence
  source 1..20: mol_type = other RNA
aacatagaggttccttgagc

SEQ ID NO: 323 - RNA, 20 nt, Synthetic construct
  misc_feature 1..20: note = RNA protospacer sequence
  source 1..20: mol_type = other RNA
tgccgttccggccgaccacg

SEQ ID NO: 324 - RNA, 20 nt, Synthetic construct
  misc_feature 1..20: note = RNA protospacer sequence
  source 1..20: mol_type = other RNA
ataggccatcagcgcatgcg

SEQ ID NO: 325 - RNA, 20 nt, Synthetic construct
  misc_feature 1..20: note = RNA protospacer sequence
  source 1..20: mol_type = other RNA
gcctccaccaatcggcagtc

SEQ ID NO: 326 - RNA, 20 nt, Synthetic construct
  misc_feature 1..20: note = RNA protospacer sequence
  source 1..20: mol_type = other RNA
gtcctttgtttacgtcccgt

SEQ ID NO: 327 - RNA, 20 nt, Synthetic construct
  misc_feature 1..20: note = RNA protospacer sequence
  source 1..20: mol_type = other RNA
tgggaacaagagctacagca

SEQ ID NO: 328 - RNA, 20 nt, Synthetic construct
  misc_feature 1..20: note = RNA protospacer sequence
  source 1..20: mol_type = other RNA
ctgtaaacaggcctattgat

SEQ ID NO: 329 - RNA, 20 nt, Synthetic construct
  misc_feature 1..20: note = RNA protospacer sequence
  source 1..20: mol_type = other RNA
gtcgcagaagatctcaatct

SEQ ID NO: 330 - RNA, 20 nt, Synthetic construct
  misc_feature 1..20: note = RNA protospacer sequence
  source 1..20: mol_type = other RNA
ctgccttcctgactgccgat

SEQ ID NO: 331 - RNA, 20 nt, Synthetic construct
  misc_feature 1..20: note = RNA protospacer sequence
  source 1..20: mol_type = other RNA
actactaattccctggatgc

SEQ ID NO: 332 - RNA, 20 nt, Synthetic construct
  misc_feature 1..20: note = RNA protospacer sequence
  source 1..20: mol_type = other RNA
cacatttcttgccttacttt

SEQ ID NO: 333 - RNA, 20 nt, Synthetic construct
  misc_feature 1..20: note = RNA protospacer sequence
  source 1..20: mol_type = other RNA
ggatgactgtctcttagagg

SEQ ID NO: 334 - RNA, 20 nt, Synthetic construct
  misc_feature 1..20: note = RNA protospacer sequence
  source 1..20: mol_type = other RNA
gctatgcctcatcttcttgt

SEQ ID NO: 335 - RNA, 20 nt, Synthetic construct
  misc_feature 1..20: note = RNA protospacer sequence
  source 1..20: mol_type = other RNA
cccgtcggcgctgaatcccg

SEQ ID NO: 336 - RNA, 20 nt, Synthetic construct
  misc_feature 1..20: note = RNA protospacer sequence
  source 1..20: mol_type = other RNA
tagtattccttggactcata

SEQ ID NO: 337 - RNA, 20 nt, Synthetic construct
  misc_feature 1..20: note = RNA protospacer sequence
  source 1..20: mol_type = other RNA
aggtaggagcgggagcattc

SEQ ID NO: 338 - RNA, 20 nt, Synthetic construct
  misc_feature 1..20: note = RNA protospacer sequence
  source 1..20: mol_type = other RNA
tcttttggggtggagccctc

SEQ ID NO: 339 - RNA, 20 nt, Synthetic construct
  misc_feature 1..20: note = RNA protospacer sequence
  source 1..20: mol_type = other RNA
tcagtatgccctgagcctga

SEQ ID NO: 340 - RNA, 20 nt, Synthetic construct
  misc_feature 1..20: note = RNA protospacer sequence
  source 1..20: mol_type = other RNA
tttaatgagtgggaggagtt

SEQ ID NO: 341 - RNA, 20 nt, Synthetic construct
  misc_feature 1..20: note = RNA protospacer sequence
  source 1..20: mol_type = other RNA
ctccctcgcctcgcagacga

SEQ ID NO: 342 - RNA, 20 nt, Synthetic construct
  misc_feature 1..20: note = RNA protospacer sequence
  source 1..20: mol_type = other RNA
gataagataggggcatttgg

SEQ ID NO: 343 - RNA, 20 nt, Synthetic construct
  misc_feature 1..20: note = RNA protospacer sequence
  source 1..20: mol_type = other RNA
ccgcgggattcagcgccgac

SEQ ID NO: 344 - RNA, 20 nt, Synthetic construct
  misc_feature 1..20: note = RNA protospacer sequence
  source 1..20: mol_type = other RNA
cagcgataaccaggacaaat

SEQ ID NO: 345 - RNA, 20 nt, Synthetic construct
  misc_feature 1..20: note = RNA protospacer sequence
  source 1..20: mol_type = other RNA
caggtaggagtgggagcatt

SEQ ID NO: 346 - RNA, 20 nt, Synthetic construct
  misc_feature 1..20: note = RNA protospacer sequence
  source 1..20: mol_type = other RNA
gtttaatgagtgggaggagt

SEQ ID NO: 347 - RNA, 20 nt, Synthetic construct
  misc_feature 1..20: note = RNA protospacer sequence
  source 1..20: mol_type = other RNA
tggtgagtgattggaggttg

SEQ ID NO: 348 - RNA, 20 nt, Synthetic construct
  misc_feature 1..20: note = RNA protospacer sequence
  source 1..20: mol_type = other RNA
taatgagtgggaggagttgg

SEQ ID NO: 349 - RNA, 20 nt, Synthetic construct
  misc_feature 1..20: note = RNA protospacer sequence
  source 1..20: mol_type = other RNA
actacatgttctggataata

SEQ ID NO: 350 - RNA, 20 nt, Synthetic construct
  misc_feature 1..20: note = RNA protospacer sequence
  source 1..20: mol_type = other RNA
ggcatagcagcaggatgaag

SEQ ID NO: 351 - RNA, 20 nt, Synthetic construct
  misc_feature 1..20: note = RNA protospacer sequence
  source 1..20: mol_type = other RNA
gttgataagataggggcatt

SEQ ID NO: 352 - RNA, 20 nt, Synthetic construct
  misc_feature 1..20: note = RNA protospacer sequence
  source 1..20: mol_type = other RNA
tcaacgaattgtgggtcttt

SEQ ID NO: 353 - RNA, 20 nt, Synthetic construct
  misc_feature 1..20: note = RNA protospacer sequence
  source 1..20: mol_type = other RNA
tatggatgatgtggtattgg

SEQ ID NO: 354 - RNA, 20 nt, Synthetic construct
  misc_feature 1..20: note = RNA protospacer sequence
  source 1..20: mol_type = other RNA
caacgaattgtgggtctttt

SEQ ID NO: 355 - RNA, 20 nt, Synthetic construct
  misc_feature 1..20: note = RNA protospacer sequence
  source 1..20: mol_type = other RNA
catttgttcagtggttcgta

SEQ ID NO: 356 - RNA, 20 nt, Synthetic construct
  misc_feature 1..20: note = RNA protospacer sequence
  source 1..20: mol_type = other RNA
cgtctaacaacagtagtttc

SEQ ID NO: 357 - RNA, 20 nt, Synthetic construct
  misc_feature 1..20: note = RNA protospacer sequence
  source 1..20: mol_type = other RNA
tgcctgagtgctgtatggtg

SEQ ID NO: 358 - RNA, 20 nt, Synthetic construct
  misc_feature 1..20: note = RNA protospacer sequence
  source 1..20: mol_type = other RNA
gccccgagacgggtcgtccg

SEQ ID NO: 359 - RNA, 20 nt, Synthetic construct
  misc_feature 1..20: note = RNA protospacer sequence
  source 1..20: mol_type = other RNA
gactgccgattggtggaggc

SEQ ID NO: 360 - RNA, 20 nt, Synthetic construct
  misc_feature 1..20: note = RNA protospacer sequence
  source 1..20: mol_type = other RNA
tatatggatgatgtggtatt

SEQ ID NO: 361 - RNA, 20 nt, Synthetic construct
  misc_feature 1..20: note = RNA protospacer sequence
  source 1..20: mol_type = other RNA
cttgagtatttggtgtcttt

SEQ ID NO: 362 - RNA, 20 nt, Synthetic construct
  misc_feature 1..20: note = RNA protospacer sequence
  source 1..20: mol_type = other RNA
gatctggtgggcgttcacgg

SEQ ID NO: 363 - RNA, 20 nt, Synthetic construct
  misc_feature 1..20: note = RNA protospacer sequence
  source 1..20: mol_type = other RNA
agactgggaggagttggggg

SEQ ID NO: 364 - RNA, 20 nt, Synthetic construct
  misc_feature 1..20: note = RNA protospacer sequence
  source 1..20: mol_type = other RNA
agtcctcttatgtaagacct

SEQ ID NO: 365 - RNA, 20 nt, Synthetic construct
  misc_feature 1..20: note = RNA protospacer sequence
  source 1..20: mol_type = other RNA
ctcaagatgttgtacagact

SEQ ID NO: 366 - RNA, 20 nt, Synthetic construct
  misc_feature 1..20: note = RNA protospacer sequence
  source 1..20: mol_type = other RNA
gggaacaagagctacagcat

SEQ ID NO: 367 - RNA, 20 nt, Synthetic construct
  misc_feature 1..20: note = RNA protospacer sequence
  source 1..20: mol_type = other RNA
tcgcagaagatctcaatctc

SEQ ID NO: 368 - RNA, 20 nt, Synthetic construct
  misc_feature 1..20: note = RNA protospacer sequence
  source 1..20: mol_type = other RNA
ggggtggagccctcaggctc

SEQ ID NO: 369 - RNA, 20 nt, Synthetic construct
  misc_feature 1..20: note = RNA protospacer sequence
  source 1..20: mol_type = other RNA
tattccttggactcataagg

SEQ ID NO: 370 - RNA, 20 nt, Synthetic construct
  misc_feature 1..20: note = RNA protospacer sequence
  source 1..20: mol_type = other RNA
tctaagagacagtcatcctc

SEQ ID NO: 371 - RNA, 20 nt, Synthetic construct
  misc_feature 1..20: note = RNA protospacer sequence
  source 1..20: mol_type = other RNA
caactcaaacaatccagatt

SEQ ID NO: 372 - RNA, 20 nt, Synthetic construct
  misc_feature 1..20: note = RNA protospacer sequence
  source 1..20: mol_type = other RNA
aaacaaaggacgtcccgcgc

SEQ ID NO: 373 - RNA, 20 nt, Synthetic construct
  misc_feature 1..20: note = RNA protospacer sequence
  source 1..20: mol_type = other RNA
ctgccaactggatcctgcgc

SEQ ID NO: 374 - RNA, 20 nt, Synthetic construct
  misc_feature 1..20: note = RNA protospacer sequence
  source 1..20: mol_type = other RNA
gaagctccaaattctttata

SEQ ID NO: 375 - RNA, 20 nt, Synthetic construct
  misc_feature 1..20: note = RNA protospacer sequence
  source 1..20: mol_type = other RNA
gtcagtatgccctgagcctg

SEQ ID NO: 376 - RNA, 20 nt, Synthetic construct
  misc_feature 1..20: note = RNA protospacer sequence
  source 1..20: mol_type = other RNA
tttcccaccttatgagtcca

SEQ ID NO: 377 - RNA, 20 nt, Synthetic construct
  misc_feature 1..20: note = RNA protospacer sequence
  source 1..20: mol_type = other RNA
acaagaggttggtgagtgat

SEQ ID NO: 378 - RNA, 20 nt, Synthetic construct
  misc_feature 1..20: note = RNA protospacer sequence
  source 1..20: mol_type = other RNA
gaaagcccaagatgatggga

SEQ ID NO: 379 - RNA, 20 nt, Synthetic construct
  misc_feature 1..20: note = RNA protospacer sequence
  source 1..20: mol_type = other RNA
aggttccacgcatgcgctga

SEQ ID NO: 380 - RNA, 20 nt, Synthetic construct
  misc_feature 1..20: note = RNA protospacer sequence
  source 1..20: mol_type = other RNA
ttggtgagtgattggaggtt

SEQ ID NO: 381 - RNA, 20 nt, Synthetic construct
  misc_feature 1..20: note = RNA protospacer sequence
  source 1..20: mol_type = other RNA
agagctacagcatgggaggt

SEQ ID NO: 382 - RNA, 20 nt, Synthetic construct
  misc_feature 1..20: note = RNA protospacer sequence
  source 1..20: mol_type = other RNA
atatggatgatgtggtattg

SEQ ID NO: 383 - RNA, 20 nt, Synthetic construct
  misc_feature 1..20: note = RNA protospacer sequence
  source 1..20: mol_type = other RNA
ccatttgttcagtggttcgt

SEQ ID NO: 384 - RNA, 20 nt, Synthetic construct
  misc_feature 1..20: note = RNA protospacer sequence
  source 1..20: mol_type = other RNA
ttatatggatgatgtggtat

SEQ ID NO: 385 - RNA, 20 nt, Synthetic construct
  misc_feature 1..20: note = RNA protospacer sequence
  source 1..20: mol_type = other RNA
ggagtgggagcattcgggcc

SEQ ID NO: 386 - RNA, 20 nt, Synthetic construct
  misc_feature 1..20: note = RNA protospacer sequence
  source 1..20: mol_type = other RNA
atttggtgtcttttggagtg

SEQ ID NO: 387 - RNA, 20 nt, Synthetic construct
  misc_feature 1..20: note = RNA protospacer sequence
  source 1..20: mol_type = other RNA
cacagaaaggccttgtaagt

SEQ ID NO: 388 - RNA, 20 nt, Synthetic construct
  misc_feature 1..20: note = RNA protospacer sequence
  source 1..20: mol_type = other RNA
accaattttcttttgtcttt

SEQ ID NO: 389 - RNA, 20 nt, Synthetic construct
  misc_feature 1..20: note = RNA protospacer sequence
  source 1..20: mol_type = other RNA
aggttaatggtctttgtact

SEQ ID NO: 390 - RNA, 20 nt, Synthetic construct
  misc_feature 1..20: note = RNA protospacer sequence
  source 1..20: mol_type = other RNA
taccaattttcttttgtctt

SEQ ID NO: 391 - RNA, 106 nt, Synthetic construct
  misc_feature 1..106: note = gRNA (spacer + SpCas9)
  source 1..106: mol_type = other RNA
ccctatcttatcaacacttcgtttaagagctatgctggaaacagcatagcaagtttaaataaggctagtccgttatcaacttgaaaaagtggcaccgagtcggtgc

SEQ ID NO: 392 - RNA, 106 nt, Synthetic construct
  misc_feature 1..106: note = gRNA (spacer + SpCas9)
  source 1..106: mol_type = other RNA
gcagaggtgaaaaagttgcagtttaagagctatgctggaaacagcatagcaagtttaaataaggctagtccgttatcaacttgaaaaagtggcaccgagtcggtgc

SEQ ID NO: 393 - RNA, 106 nt, Synthetic construct
  misc_feature 1..106: note = gRNA (spacer + SpCas9)
  source 1..106: mol_type = other RNA
tggacttctctcaattttctgtttaagagctatgctggaaacagcatagcaagtttaaataaggctagtccgttatcaacttgaaaaagtggcaccgagtcggtgc

SEQ ID NO: 394 - RNA, 106 nt, Synthetic construct
  misc_feature 1..106: note = gRNA (spacer + SpCas9)
  source 1..106: mol_type = other RNA
accccgcctgtaacacgagcgtttaagagctatgctggaaacagcatagcaagtttaaataaggctagtccgttatcaacttgaaaaagtggcaccgagtcggtgc

SEQ ID NO: 395 - RNA, 106 nt, Synthetic construct
  misc_feature 1..106: note = gRNA (spacer + SpCas9)
  source 1..106: mol_type = other RNA
cccgcctgtaacacgagcaggtttaagagctatgctggaaacagcatagcaagtttaaataaggctagtccgttatcaacttgaaaaagtggcaccgagtcggtgc

SEQ ID NO: 396 - RNA, 106 nt, Synthetic construct
  misc_feature 1..106: note = gRNA (spacer + SpCas9)
  source 1..106: mol_type = other RNA
caccacgagtctagactctggtttaagagctatgctggaaacagcatagcaagtttaaataaggctagtccgttatcaacttgaaaaagtggcaccgagtcggtgc

SEQ ID NO: 397 - RNA, 106 nt, Synthetic construct
  misc_feature 1..106: note = gRNA (spacer + SpCas9)
  source 1..106: mol_type = other RNA
gaggtgaagcgaagtgcacagtttaagagctatgctggaaacagcatagcaagtttaaataaggctagtccgttatcaacttgaaaaagtggcaccgagtcggtgc

SEQ ID NO: 398 - RNA, 106 nt, Synthetic construct
  misc_feature 1..106: note = gRNA (spacer + SpCas9)
  source 1..106: mol_type = other RNA
ccggaagtgttgataagatagtttaagagctatgctggaaacagcatagcaagtttaaataaggctagtccgttatcaacttgaaaaagtggcaccgagtcggtgc

SEQ ID NO: 399 - RNA, 106 nt, Synthetic construct
  misc_feature 1..106: note = gRNA (spacer + SpCas9)
  source 1..106: mol_type = other RNA
agaagatgaggcatagcagcgtttaagagctatgctggaaacagcatagcaagtttaaataaggctagtccgttatcaacttgaaaaagtggcaccgagtcggtgc

SEQ ID NO: 400 - RNA, 106 nt, Synthetic construct
  misc_feature 1..106: note = gRNA (spacer + SpCas9)
  source 1..106: mol_type = other RNA
tccgcagtatggatcggcaggtttaagagctatgctggaaacagcatagcaagtttaaataaggctagtccgttatcaacttgaaaaagtggcaccgagtcggtgc

SEQ ID NO: 401 - RNA, 106 nt, Synthetic construct
  misc_feature 1..106: note = gRNA (spacer + SpCas9)
  source 1..106: mol_type = other RNA
ggacttctctcaattttctagtttaagagctatgctggaaacagcatagcaagtttaaataaggctagtccgttatcaacttgaaaaagtggcaccgagtcggtgc

SEQ ID NO: 402 - RNA, 106 nt, Synthetic construct
  misc_feature 1..106: note = gRNA (spacer + SpCas9)
  source 1..106: mol_type = other RNA
ccacccaaggcacagcttgggtttaagagctatgctggaaacagcatagcaagtttaaataaggctagtccgttatcaacttgaaaaagtggcaccgagtcggtgc

SEQ ID NO: 403 - RNA, 106 nt, Synthetic construct
  misc_feature 1..106: note = gRNA (spacer + SpCas9)
  source 1..106: mol_type = other RNA
agagaggtgcgccccgtggtgtttaagagctatgctggaaacagcatagcaagtttaaataaggctagtccgttatcaacttgaaaaagtggcaccgagtcggtgc

SEQ ID NO: 404 - RNA, 106 nt, Synthetic construct
  misc_feature 1..106: note = gRNA (spacer + SpCas9)
  source 1..106: mol_type = other RNA
gattgagatcttctgcgacggtttaagagctatgctggaaacagcatagcaagtttaaataaggctagtccgttatcaacttgaaaaagtggcaccgagtcggtgc

SEQ ID NO: 405 - RNA, 106 nt, Synthetic construct
  misc_feature 1..106: note = gRNA (spacer + SpCas9)
  source 1..106: mol_type = other RNA
caagcctccaagctgtgcctgtttaagagctatgctggaaacagcatagcaagtttaaataaggctagtccgttatcaacttgaaaaagtggcaccgagtcggtgc

SEQ ID NO: 406 - RNA, 106 nt, Synthetic construct
  misc_feature 1..106: note = gRNA (spacer + SpCas9)
  source 1..106: mol_type = other RNA
ggcgagggagttcttcttctgtttaagagctatgctggaaacagcatagcaagtttaaataaggctagtccgttatcaacttgaaaaagtggcaccgagtcggtgc

SEQ ID NO: 407 - RNA, 106 nt, Synthetic construct
  misc_feature 1..106: note = gRNA (spacer + SpCas9)
  source 1..106: mol_type = other RNA
tccggaagtgttgataagatgtttaagagctatgctggaaacagcatagcaagtttaaataaggctagtccgttatcaacttgaaaaagtggcaccgagtcggtgc

SEQ ID NO: 408 - RNA, 106 nt, Synthetic construct
  misc_feature 1..106: note = gRNA (spacer + SpCas9)
  source 1..106: mol_type = other RNA
aagccacccaaggcacagctgtttaagagctatgctggaaacagcatagcaagtttaaataaggctagtccgttatcaacttgaaaaagtggcaccgagtcggtgc

SEQ ID NO: 409 - RNA, 106 nt, Synthetic construct
  misc_feature 1..106: note = gRNA (spacer + SpCas9)
  source 1..106: mol_type = other RNA
cctccaagctgtgccttggggtttaagagctatgctggaaacagcatagcaagtttaaataaggctagtccgttatcaacttgaaaaagtggcaccgagtcggtgc

SEQ ID NO: 410 - RNA, 106 nt, Synthetic construct
  misc_feature 1..106: note = gRNA (spacer + SpCas9)
  source 1..106: mol_type = other RNA
gtaaagagaggtgcgccccggtttaagagctatgctggaaacagcatagcaagtttaaataaggctagtccgttatcaacttgaaaaagtggcaccgagtcggtgc

SEQ ID NO: 411 - RNA, 106 nt, Synthetic construct
  misc_feature 1..106: note = gRNA (spacer + SpCas9)
  source 1..106: mol_type = other RNA
ggcagatgagaaggcacagagtttaagagctatgctggaaacagcatagcaagtttaaataaggctagtccgttatcaacttgaaaaagtggcaccgagtcggtgc

SEQ ID NO: 412 - RNA, 106 nt, Synthetic construct
  misc_feature 1..106: note = gRNA (spacer + SpCas9)
  source 1..106: mol_type = other RNA
aggagttccgcagtatggatgtttaagagctatgctggaaacagcatagcaagtttaaataaggctagtccgttatcaacttgaaaaagtggcaccgagtcggtgc

SEQ ID NO: 413 - RNA, 106 nt, Synthetic construct
  misc_feature 1..106: note = gRNA (spacer + SpCas9)
  source 1..106: mol_type = other RNA
gctgtgccttgggtggctttgtttaagagctatgctggaaacagcatagcaagtttaaataaggctagtccgttatcaacttgaaaaagtggcaccgagtcggtgc

SEQ ID NO: 414 - RNA, 106 nt, Synthetic construct
  misc_feature 1..106: note = gRNA (spacer + SpCas9)
  source 1..106: mol_type = other RNA
acccctgctcgtgttacagggtttaagagctatgctggaaacagcatagcaagtttaaataaggctagtccgttatcaacttgaaaaagtggcaccgagtcggtgc

SEQ ID NO: 415 - RNA, 106 nt, Synthetic construct
  misc_feature 1..106: note = gRNA (spacer + SpCas9)
  source 1..106: mol_type = other RNA
cggaagtgttgataagataggtttaagagctatgctggaaacagcatagcaagtttaaataaggctagtccgttatcaacttgaaaaagtggcaccgagtcggtgc

SEQ ID NO: 416 - RNA, 106 nt, Synthetic construct
  misc_feature 1..106: note = gRNA (spacer + SpCas9)
  source 1..106: mol_type = other RNA
cctgctggtggctccagttcgtttaagagctatgctggaaacagcatagcaagtttaaataaggctagtccgttatcaacttgaaaaagtggcaccgagtcggtgc

SEQ ID NO: 417 - RNA, 106 nt, Synthetic construct
  misc_feature 1..106: note = gRNA (spacer + SpCas9)
  source 1..106: mol_type = other RNA
cgagggagttcttcttctaggtttaagagctatgctggaaacagcatagcaagtttaaataaggctagtccgttatcaacttgaaaaagtggcaccgagtcggtgc

SEQ ID NO: 418 - RNA, 106 nt, Synthetic construct
  misc_feature 1..106: note = gRNA (spacer + SpCas9)
  source 1..106: mol_type = other RNA
ggggcgcacctctctttacggtttaagagctatgctggaaacagcatagcaagtttaaataaggctagtccgttatcaacttgaaaaagtggcaccgagtcggtgc

SEQ ID NO: 419 - RNA, 106 nt, Synthetic construct
  misc_feature 1..106: note = gRNA (spacer + SpCas9)
  source 1..106: mol_type = other RNA
agcttggaggcttgaacagtgtttaagagctatgctggaaacagcatagcaagtttaaataaggctagtccgttatcaacttgaaaaagtggcaccgagtcggtgc

SEQ ID NO: 420 - RNA, 106 nt, Synthetic construct
  misc_feature 1..106: note = gRNA (spacer + SpCas9)
  source 1..106: mol_type = other RNA
aagcctccaagctgtgccttgtttaagagctatgctggaaacagcatagcaagtttaaataaggctagtccgttatcaacttgaaaaagtggcaccgagtcggtgc

SEQ ID NO: 421 - RNA, 106 nt, Synthetic construct
  misc_feature 1..106: note = gRNA (spacer + SpCas9)
  source 1..106: mol_type = other RNA
cccctgctcgtgttacaggcgtttaagagctatgctggaaacagcatagcaagtttaaataaggctagtccgttatcaacttgaaaaagtggcaccgagtcggtgc

SEQ ID NO: 422 - RNA, 106 nt, Synthetic construct
  misc_feature 1..106: note = gRNA (spacer + SpCas9)
  source 1..106: mol_type = other RNA
gcgagggagttcttcttctagtttaagagctatgctggaaacagcatagcaagtttaaataaggctagtccgttatcaacttgaaaaagtggcaccgagtcggtgc

SEQ ID NO: 423 - RNA, 106 nt, Synthetic construct
  misc_feature 1..106: note = gRNA (spacer + SpCas9)
  source 1..106: mol_type = other RNA
tactagtgccatttgttcaggtttaagagctatgctggaaacagcatagcaagtttaaataaggctagtccgttatcaacttgaaaaagtggcaccgagtcggtgc

SEQ ID NO: 424 - RNA, 106 nt, Synthetic construct
  misc_feature 1..106: note = gRNA (spacer + SpCas9)
  source 1..106: mol_type = other RNA
gacttctctcaattttctaggtttaagagctatgctggaaacagcatagcaagtttaaataaggctagtccgttatcaacttgaaaaagtggcaccgagtcggtgc

SEQ ID NO: 425 - RNA, 106 nt, Synthetic construct
  misc_feature 1..106: note = gRNA (spacer + SpCas9)
  source 1..106: mol_type = other RNA
attgacccgtataaagaattgtttaagagctatgctggaaacagcatagcaagtttaaataaggctagtccgttatcaacttgaaaaagtggcaccgagtcggtgc

SEQ ID NO: 426 - RNA, 106 nt, Synthetic construct
  misc_feature 1..106: note = gRNA (spacer + SpCas9)
  source 1..106: mol_type = other RNA
acccaaagacaaaagaaaatgtttaagagctatgctggaaacagcatagcaagtttaaataaggctagtccgttatcaacttgaaaaagtggcaccgagtcggtgc

SEQ ID NO: 427 - RNA, 106 nt, Synthetic construct
  misc_feature 1..106: note = gRNA (spacer + SpCas9)
  source 1..106: mol_type = other RNA
gtcctcttatgtaagaccttgtttaagagctatgctggaaacagcatagcaagtttaaataaggctagtccgttatcaacttgaaaaagtggcaccgagtcggtgc

SEQ ID NO: 428 - RNA, 106 nt, Synthetic construct
  misc_feature 1..106: note = gRNA (spacer + SpCas9)
  source 1..106: mol_type = other RNA
tgatcgggaaagaatcccaggtttaagagctatgctggaaacagcatagcaagtttaaataaggctagtccgttatcaacttgaaaaagtggcaccgagtcggtgc

SEQ ID NO: 429 - RNA, 106 nt, Synthetic construct
  misc_feature 1..106: note = gRNA (spacer + SpCas9)
  source 1..106: mol_type = other RNA
tttgctgacgcaacccccacgtttaagagctatgctggaaacagcatagcaagtttaaataaggctagtccgttatcaacttgaaaaagtggcaccgagtcggtgc

SEQ ID NO: 430 - RNA, 106 nt, Synthetic construct
  misc_feature 1..106: note = gRNA (spacer + SpCas9)
  source 1..106: mol_type = other RNA
atgaatctagccacctgggtgtttaagagctatgctggaaacagcatagcaagtttaaataaggctagtccgttatcaacttgaaaaagtggcaccgagtcggtgc

SEQ ID NO: 431 - RNA, 106 nt, Synthetic construct
  misc_feature 1..106: note = gRNA (spacer + SpCas9)
  source 1..106: mol_type = other RNA
ggtctccatgcgacgtgcaggtttaagagctatgctggaaacagcatagcaagtttaaataaggctagtccgttatcaacttgaaaaagtggcaccgagtcggtgc

SEQ ID NO: 432 - RNA, 106 nt, Synthetic construct
  misc_feature 1..106: note = gRNA (spacer + SpCas9)
  source 1..106: mol_type = other RNA
ggactgaggcccactcccatgtttaagagctatgctggaaacagcatagcaagtttaaataaggctagtccgttatcaacttgaaaaagtggcaccgagtcggtgc

SEQ ID NO: 433 - RNA, 106 nt, Synthetic construct
  misc_feature 1..106: note = gRNA (spacer + SpCas9)
  source 1..106: mol_type = other RNA
cacagagtctagactcgtgggtttaagagctatgctggaaacagcatagcaagtttaaataaggctagtccgttatcaacttgaaaaagtggcaccgagtcggtgc

SEQ ID NO: 434 - RNA, 106 nt, Synthetic construct
  misc_feature 1..106: note = gRNA (spacer + SpCas9)
  source 1..106: mol_type = other RNA
gaagaaccaacaagaagatggtttaagagctatgctggaaacagcatagcaagtttaaataaggctagtccgttatcaacttgaaaaagtggcaccgagtcggtgc

SEQ ID NO: 435 - RNA, 106 nt, Synthetic construct
  misc_feature 1..106: note = gRNA (spacer + SpCas9)
  source 1..106: mol_type = other RNA
acacggtccggcagatgagagtttaagagctatgctggaaacagcatagcaagtttaaataaggctagtccgttatcaacttgaaaaagtggcaccgagtcggtgc

SEQ ID NO: 436 - RNA, 106 nt, Synthetic construct
  misc_feature 1..106: note = gRNA (spacer + SpCas9)
  source 1..106: mol_type = other RNA
gacatgaacatgagatgattgtttaagagctatgctggaaacagcatagcaagtttaaataaggctagtccgttatcaacttgaaaaagtggcaccgagtcggtgc

SEQ ID NO: 437 - RNA, 106 nt, Synthetic construct
  misc_feature 1..106: note = gRNA (spacer + SpCas9)
  source 1..106: mol_type = other RNA
gcagcacagcctagcagccagtttaagagctatgctggaaacagcatagcaagtttaaataaggctagtccgttatcaacttgaaaaagtggcaccgagtcggtgc

SEQ ID NO: 438 - RNA, 106 nt, Synthetic construct
  misc_feature 1..106: note = gRNA (spacer + SpCas9)
  source 1..106: mol_type = other RNA
tcctggaattagaggacaaagtttaagagctatgctggaaacagcatagcaagtttaaataaggctagtccgttatcaacttgaaaaagtggcaccgagtcggtgc

SEQ ID NO: 439 - RNA, 106 nt, Synthetic construct
  misc_feature 1..106: note = gRNA (spacer + SpCas9)
  source 1..106: mol_type = other RNA
gtcttacataagaggactctgtttaagagctatgctggaaacagcatagcaagtttaaataaggctagtccgttatcaacttgaaaaagtggcaccgagtcggtgc

SEQ ID NO: 440 - RNA, 106 nt, Synthetic construct
  misc_feature 1..106: note = gRNA (spacer + SpCas9)
  source 1..106: mol_type = other RNA
ttgtgggtcaccatattcttgtttaagagctatgctggaaacagcatagcaagtttaaataaggctagtccgttatcaacttgaaaaagtggcaccgagtcggtgc

SEQ ID NO: 441 - RNA, 106 nt, Synthetic construct
  misc_feature 1..106: note = gRNA (spacer + SpCas9)
  source 1..106: mol_type = other RNA
cgcaaaatacctatgggagtgtttaagagctatgctggaaacagcatagcaagtttaaataaggctagtccgttatcaacttgaaaaagtggcaccgagtcggtgc

SEQ ID NO: 442 - RNA, 106 nt, Synthetic construct
  misc_feature 1..106: note = gRNA (spacer + SpCas9)
  source 1..106: mol_type = other RNA
gggttgcgtcagcaaacactgtttaagagctatgctggaaacagcatagcaagtttaaataaggctagtccgttatcaacttgaaaaagtggcaccgagtcggtgc

SEQ ID NO: 443 - RNA, 106 nt, Synthetic construct
  misc_feature 1..106: note = gRNA (spacer + SpCas9)
  source 1..106: mol_type = other RNA
agctcttgttcccaagaatagtttaagagctatgctggaaacagcatagcaagtttaaataaggctagtccgttatcaacttgaaaaagtggcaccgagtcggtgc

SEQ ID NO: 444 - RNA, 106 nt, Synthetic construct
  misc_feature 1..106: note = gRNA (spacer + SpCas9)
  source 1..106: mol_type = other RNA
tgacatactttccaatcaatgtttaagagctatgctggaaacagcatagcaagtttaaataaggctagtccgttatcaacttgaaaaagtggcaccgagtcggtgc

SEQ ID NO: 445 - RNA, 106 nt, Synthetic construct
  misc_feature 1..106: note = gRNA (spacer + SpCas9)
  source 1..106: mol_type = other RNA
cagatgagaaggcacagacggtttaagagctatgctggaaacagcatagcaagtttaaataaggctagtccgttatcaacttgaaaaagtggcaccgagtcggtgc

SEQ ID NO: 446 - RNA, 106 nt, Synthetic construct
  misc_feature 1..106: note = gRNA (spacer + SpCas9)
  source 1..106: mol_type = other RNA
ccccgcctgtaacacgagcagtttaagagctatgctggaaacagcatagcaagtttaaataaggctagtccgttatcaacttgaaaaagtggcaccgagtcggtgc

SEQ ID NO: 447 - RNA, 106 nt, Synthetic construct
  misc_feature 1..106: note = gRNA (spacer + SpCas9)
  source 1..106: mol_type = other RNA
gggtggagccctcaggctcagtttaagagctatgctggaaacagcatagcaagtttaaataaggctagtccgttatcaacttgaaaaagtggcaccgagtcggtgc

SEQ ID NO: 448 - RNA, 106 nt, Synthetic construct
  misc_feature 1..106: note = gRNA (spacer + SpCas9)
  source 1..106: mol_type = other RNA
attccttggactcataaggtgtttaagagctatgctggaaacagcatagcaagtttaaataaggctagtccgttatcaacttgaaaaagtggcaccgagtcggtgc

SEQ ID NO: 449 - RNA, 106 nt, Synthetic construct
  misc_feature 1..106: note = gRNA (spacer + SpCas9)
  source 1..106: mol_type = other RNA
tttgtgggtcaccatattctgtttaagagctatgctggaaacagcatagcaagtttaaataaggctagtccgttatcaacttgaaaaagtggcaccgagtcggtgc

SEQ ID NO: 450 - RNA, 106 nt, Synthetic construct
  misc_feature 1..106: note = gRNA (spacer + SpCas9)
  source 1..106: mol_type = other RNA
gtgaaaaagttgcatggtgcgtttaagagctatgctggaaacagcatagcaagtttaaataaggctagtccgttatcaacttgaaaaagtggcaccgagtcggtgc

SEQ ID NO: 451 - RNA, 106 nt, Synthetic construct
  misc_feature 1..106: note = gRNA (spacer + SpCas9)
  source 1..106: mol_type = other RNA
cctgaactggagccaccagcgtttaagagctatgctggaaacagcatagcaagtttaaataaggctagtccgttatcaacttgaaaaagtggcaccgagtcggtgc

SEQ ID NO: 452 - RNA, 106 nt, Synthetic construct
  misc_feature 1..106: note = gRNA (spacer + SpCas9)
  source 1..106: mol_type = other RNA
tcctctgccgatccatactggtttaagagctatgctggaaacagcatagcaagtttaaataaggctagtccgttatcaacttgaaaaagtggcaccgagtcggtgc

SEQ ID NO: 453 - RNA, 106 nt, Synthetic construct
  misc_feature 1..106: note = gRNA (spacer + SpCas9)
  source 1..106: mol_type = other RNA
cggctaggagttccgcagtagtttaagagctatgctggaaacagcatagcaagtttaaataaggctagtccgttatcaacttgaaaaagtggcaccgagtcggtgc

SEQ ID NO: 454 - RNA, 106 nt, Synthetic construct
  misc_feature 1..106: note = gRNA (spacer + SpCas9)
  source 1..106: mol_type = other RNA
aatgtcaacgaccgaccttggtttaagagctatgctggaaacagcatagcaagtttaaataaggctagtccgttatcaacttgaaaaagtggcaccgagtcggtgc

SEQ ID NO: 455 - RNA, 106 nt, Synthetic construct
  misc_feature 1..106: note = gRNA (spacer + SpCas9)
  source 1..106: mol_type = other RNA
gaccttcgtctgcgaggcgagtttaagagctatgctggaaacagcatagcaagtttaaataaggctagtccgttatcaacttgaaaaagtggcaccgagtcggtgc

SEQ ID NO: 456 - RNA, 106 nt, Synthetic construct
  misc_feature 1..106: note = gRNA (spacer + SpCas9)
  source 1..106: mol_type = other RNA
gttgccgggcaacggggtaagtttaagagctatgctggaaacagcatagcaagtttaaataaggctagtccgttatcaacttgaaaaagtggcaccgagtcggtgc

SEQ ID NO: 457 - RNA, 106 nt, Synthetic construct
  misc_feature 1..106: note = gRNA (spacer + SpCas9)
  source 1..106: mol_type = other RNA
gattgagaccttcgtctgcggtttaagagctatgctggaaacagcatagcaagtttaaataaggctagtccgttatcaacttgaaaaagtggcaccgagtcggtgc

SEQ ID NO: 458 - RNA, 106 nt, Synthetic construct
  misc_feature 1..106: note = gRNA (spacer + SpCas9)
  source 1..106: mol_type = other RNA
aggacccctgctcgtgttacgtttaagagctatgctggaaacagcatagcaagtttaaataaggctagtccgttatcaacttgaaaaagtggcaccgagtcggtgc

SEQ ID NO: 459 - RNA, 106 nt, Synthetic construct
  misc_feature 1..106: note = gRNA (spacer + SpCas9)
  source 1..106: mol_type = other RNA
tttgaagtatgcctcaaggtgtttaagagctatgctggaaacagcatagcaagtttaaataaggctagtccgttatcaacttgaaaaagtggcaccgagtcggtgc

SEQ ID NO: 460 - RNA, 106 nt, Synthetic construct
  misc_feature 1..106: note = gRNA (spacer + SpCas9)
  source 1..106: mol_type = other RNA
ccgcttgttttgctcgcagcgtttaagagctatgctggaaacagcatagcaagtttaaataaggctagtccgttatcaacttgaaaaagtggcaccgagtcggtgc

SEQ ID NO: 461 - RNA, 106 nt, Synthetic construct
  misc_feature 1..106: note = gRNA (spacer + SpCas9)
  source 1..106: mol_type = other RNA
tgctaggctgtgctgccaacgtttaagagctatgctggaaacagcatagcaagtttaaataaggctagtccgttatcaacttgaaaaagtggcaccgagtcggtgc

SEQ ID NO: 462 - RNA, 106 nt, Synthetic construct
  misc_feature 1..106: note = gRNA (spacer + SpCas9)
  source 1..106: mol_type = other RNA
tgccgattggtggaggcagggtttaagagctatgctggaaacagcatagcaagtttaaataaggctagtccgttatcaacttgaaaaagtggcaccgagtcggtgc

SEQ ID NO: 463 - RNA, 106 nt, Synthetic construct
  misc_feature 1..106: note = gRNA (spacer + SpCas9)
  source 1..106: mol_type = other RNA
tctttgtactaggaggctgtgtttaagagctatgctggaaacagcatagcaagtttaaataaggctagtccgttatcaacttgaaaaagtggcaccgagtcggtgc

SEQ ID NO: 464 - RNA, 106 nt, Synthetic construct
  misc_feature 1..106: note = gRNA (spacer + SpCas9)
  source 1..106: mol_type = other RNA
cgtcccgcgcaggatccagtgtttaagagctatgctggaaacagcatagcaagtttaaataaggctagtccgttatcaacttgaaaaagtggcaccgagtcggtgc

SEQ ID NO: 465 - RNA, 106 nt, Synthetic construct
  misc_feature 1..106: note = gRNA (spacer + SpCas9)
  source 1..106: mol_type = other RNA
aaagcccaagatgatgggatgtttaagagctatgctggaaacagcatagcaagtttaaataaggctagtccgttatcaacttgaaaaagtggcaccgagtcggtgc

SEQ ID NO: 466 - RNA, 106 nt, Synthetic construct
  misc_feature 1..106: note = gRNA (spacer + SpCas9)
  source 1..106: mol_type = other RNA
gcagatgagaaggcacagacgtttaagagctatgctggaaacagcatagcaagtttaaataaggctagtccgttatcaacttgaaaaagtggcaccgagtcggtgc

SEQ ID NO: 467 - RNA, 106 nt, Synthetic construct
  misc_feature 1..106: note = gRNA (spacer + SpCas9)
  source 1..106: mol_type = other RNA
cgattggtggaggcaggagggtttaagagctatgctggaaacagcatagcaagtttaaataaggctagtccgttatcaacttgaaaaagtggcaccgagtcggtgc

SEQ ID NO: 468 - RNA, 106 nt, Synthetic construct
  misc_feature 1..106: note = gRNA (spacer + SpCas9)
  source 1..106: mol_type = other RNA
aggaggctgtaggcataaatgtttaagagctatgctggaaacagcatagcaagtttaaataaggctagtccgttatcaacttgaaaaagtggcaccgagtcggtgc

SEQ ID NO: 469 - RNA, 106 nt, Synthetic construct
  misc_feature 1..106: note = gRNA (spacer + SpCas9)
  source 1..106: mol_type = other RNA
ccatgccccaaagccacccagtttaagagctatgctggaaacagcatagcaagtttaaataaggctagtccgttatcaacttgaaaaagtggcaccgagtcggtgc

SEQ ID NO: 470 - RNA, 106 nt, Synthetic construct
  misc_feature 1..106: note = gRNA (spacer + SpCas9)
  source 1..106: mol_type = other RNA
aggttggggactgcgaatttgtttaagagctatgctggaaacagcatagcaagtttaaataaggctagtccgttatcaacttgaaaaagtggcaccgagtcggtgc

SEQ ID NO: 471 - RNA, 106 nt, Synthetic construct
  misc_feature 1..106: note = gRNA (spacer + SpCas9)
  source 1..106: mol_type = other RNA
agaccttcgtctgcgaggcggtttaagagctatgctggaaacagcatagcaagtttaaataaggctagtccgttatcaacttgaaaaagtggcaccgagtcggtgc

SEQ ID NO: 472 - RNA, 106 nt, Synthetic construct
  misc_feature 1..106: note = gRNA (spacer + SpCas9)
  source 1..106: mol_type = other RNA
cctggaattagaggacaaacgtttaagagctatgctggaaacagcatagcaagtttaaataaggctagtccgttatcaacttgaaaaagtggcaccgagtcggtgc

SEQ ID NO: 473 - RNA, 106 nt, Synthetic construct
  misc_feature 1..106: note = gRNA (spacer + SpCas9)
  source 1..106: mol_type = other RNA
tttcagttatatggatgatggtttaagagctatgctggaaacagcatagcaagtttaaataaggctagtccgttatcaacttgaaaaagtggcaccgagtcggtgc

SEQ ID NO: 474 - RNA, 106 nt, Synthetic construct
  misc_feature 1..106: note = gRNA (spacer + SpCas9)
  source 1..106: mol_type = other RNA
gtaacacgagcaggggtcctgtttaagagctatgctggaaacagcatagcaagtttaaataaggctagtccgttatcaacttgaaaaagtggcaccgagtcggtgc

SEQ ID NO: 475 - RNA, 106 nt, Synthetic construct
  misc_feature 1..106: note = gRNA (spacer + SpCas9)
  source 1..106: mol_type = other RNA
catcttcttgttggttcttcgtttaagagctatgctggaaacagcatagcaagtttaaataaggctagtccgttatcaacttgaaaaagtggcaccgagtcggtgc

SEQ ID NO: 476 - RNA, 106 nt, Synthetic construct
  misc_feature 1..106: note = gRNA (spacer + SpCas9)
  source 1..106: mol_type = other RNA
cggggagaccgcgtaaagaggtttaagagctatgctggaaacagcatagcaagtttaaataaggctagtccgttatcaacttgaaaaagtggcaccgagtcggtgc

SEQ ID NO: 477 - RNA, 106 nt, Synthetic construct
  misc_feature 1..106: note = gRNA (spacer + SpCas9)
  source 1..106: mol_type = other RNA
ctagactctgtggtattgtggtttaagagctatgctggaaacagcatagcaagtttaaataaggctagtccgttatcaacttgaaaaagtggcaccgagtcggtgc

SEQ ID NO: 478 - RNA, 106 nt, Synthetic construct
  misc_feature 1..106: note = gRNA (spacer + SpCas9)
  source 1..106: mol_type = other RNA
ccctgctcgtgttacaggcggtttaagagctatgctggaaacagcatagcaagtttaaataaggctagtccgttatcaacttgaaaaagtggcaccgagtcggtgc

SEQ ID NO: 479 - RNA, 106 nt, Synthetic construct
  misc_feature 1..106: note = gRNA (spacer + SpCas9)
  source 1..106: mol_type = other RNA
taccacagagtctagactcggtttaagagctatgctggaaacagcatagcaagtttaaataaggctagtccgttatcaacttgaaaaagtggcaccgagtcggtgc

SEQ ID NO: 480 - RNA, 106 nt, Synthetic construct
  misc_feature 1..106: note = gRNA (spacer + SpCas9)
  source 1..106: mol_type = other RNA
tcgcaaaatacctatgggaggtttaagagctatgctggaaacagcatagcaagtttaaataaggctagtccgttatcaacttgaaaaagtggcaccgagtcggtgc

SEQ ID NO: 481 - RNA, 106 nt, Synthetic construct
  misc_feature 1..106: note = gRNA (spacer + SpCas9)
  source 1..106: mol_type = other RNA
gtctgtgccttctcatctgcgtttaagagctatgctggaaacagcatagcaagtttaaataaggctagtccgttatcaacttgaaaaagtggcaccgagtcggtgc

SEQ ID NO: 482 - RNA, 106 nt, Synthetic construct
  misc_feature 1..106: note = gRNA (spacer + SpCas9)
  source 1..106: mol_type = other RNA
acacgtagcgcctcattttggtttaagagctatgctggaaacagcatagcaagtttaaataaggctagtccgttatcaacttgaaaaagtggcaccgagtcggtgc

SEQ ID NO: 483 - RNA, 106 nt, Synthetic construct
  misc_feature 1..106: note = gRNA (spacer + SpCas9)
  source 1..106: mol_type = other RNA
ttggggttgaggtcccaatcgtttaagagctatgctggaaacagcatagcaagtttaaataaggctagtccgttatcaacttgaaaaagtggcaccgagtcggtgc

SEQ ID NO: 484 - RNA, 106 nt, Synthetic construct
  misc_feature 1..106: note = gRNA (spacer + SpCas9)
  source 1..106: mol_type = other RNA
ccccgagacgggtcgtccgcgtttaagagctatgctggaaacagcatagcaagtttaaataaggctagtccgttatcaacttgaaaaagtggcaccgagtcggtgc

SEQ ID NO: 485 - RNA, 106 nt, Synthetic construct
  misc_feature 1..106: note = gRNA (spacer + SpCas9)
  source 1..106: mol_type = other RNA
cctacgaaccactgaacaaagtttaagagctatgctggaaacagcatagcaagtttaaataaggctagtccgttatcaacttgaaaaagtggcaccgagtcggtgc

SEQ ID NO: 486 - RNA, 106 nt, Synthetic construct
  misc_feature 1..106: note = gRNA (spacer + SpCas9)
  source 1..106: mol_type = other RNA
ttacatactctgtggaaggcgtttaagagctatgctggaaacagcatagcaagtttaaataaggctagtccgttatcaacttgaaaaagtggcaccgagtcggtgc

SEQ ID NO: 487 - RNA, 106 nt, Synthetic construct
  misc_feature 1..106: note = gRNA (spacer + SpCas9)
  source 1..106: mol_type = other RNA
acctcctttccatggctgctgtttaagagctatgctggaaacagcatagcaagtttaaataaggctagtccgttatcaacttgaaaaagtggcaccgagtcggtgc

SEQ ID NO: 488 - RNA, 106 nt, Synthetic construct
  misc_feature 1..106: note = gRNA (spacer + SpCas9)
  source 1..106: mol_type = other RNA
gttatcgctggatgtgtctggtttaagagctatgctggaaacagcatagcaagtttaaataaggctagtccgttatcaacttgaaaaagtggcaccgagtcggtgc

SEQ ID NO: 489 - RNA, 106 nt, Synthetic construct
  misc_feature 1..106: note = gRNA (spacer + SpCas9)
  source 1..106: mol_type = other RNA
aacatgagatgattaggcaggtttaagagctatgctggaaacagcatagcaagtttaaataaggctagtccgttatcaacttgaaaaagtggcaccgagtcggtgc

SEQ ID NO: 490 - RNA, 106 nt, Synthetic construct
  misc_feature 1..106: note = gRNA (spacer + SpCas9)
  source 1..106: mol_type = other RNA
acttctctcaattttctagggtttaagagctatgctggaaacagcatagcaagtttaaataaggctagtccgttatcaacttgaaaaagtggcaccgagtcggtgc

SEQ ID NO: 491 - RNA, 106 nt, Synthetic construct
  misc_feature 1..106: note = gRNA (spacer + SpCas9)
  source 1..106: mol_type = other RNA
cactttctcgccaacttacagtttaagagctatgctggaaacagcatagcaagtttaaataaggctagtccgttatcaacttgaaaaagtggcaccgagtcggtgc

SEQ ID NO: 492 - RNA, 106 nt, Synthetic construct
  misc_feature 1..106: note = gRNA (spacer + SpCas9)
  source 1..106: mol_type = other RNA
cataaggtgggaaactttacgtttaagagctatgctggaaacagcatagcaagtttaaataaggctagtccgttatcaacttgaaaaagtggcaccgagtcggtgc

SEQ ID NO: 493 - RNA, 106 nt, Synthetic construct
  misc_feature 1..106: note = gRNA (spacer + SpCas9)
  source 1..106: mol_type = other RNA
ccaaacctcgaaaaggcatggtttaagagctatgctggaaacagcatagcaagtttaaataaggctagtccgttatcaacttgaaaaagtggcaccgagtcggtgc

SEQ ID NO: 494 - RNA, 106 nt, Synthetic construct
  misc_feature 1..106: note = gRNA (spacer + SpCas9)
  source 1..106: mol_type = other RNA
atagaaggaaagaagtcagagtttaagagctatgctggaaacagcatagcaagtttaaataaggctagtccgttatcaacttgaaaaagtggcaccgagtcggtgc

SEQ ID NO: 495 - RNA, 106 nt, Synthetic construct
  misc_feature 1..106: note = gRNA (spacer + SpCas9)
  source 1..106: mol_type = other RNA
gctgctccttttacacaatggtttaagagctatgctggaaacagcatagcaagtttaaataaggctagtccgttatcaacttgaaaaagtggcaccgagtcggtgc

SEQ ID NO: 496 - RNA, 106 nt, Synthetic construct
  misc_feature 1..106: note = gRNA (spacer + SpCas9)
  source 1..106: mol_type = other RNA
gaagcgaagtgcacacggtcgtttaagagctatgctggaaacagcatagcaagtttaaataaggctagtccgttatcaacttgaaaaagtggcaccgagtcggtgc

SEQ ID NO: 497 - RNA, 106 nt, Synthetic construct
  misc_feature 1..106: note = gRNA (spacer + SpCas9)
  source 1..106: mol_type = other RNA
ggatcatcaaccaccagcacgtttaagagctatgctggaaacagcatagcaagtttaaataaggctagtccgttatcaacttgaaaaagtggcaccgagtcggtgc

SEQ ID NO: 498 - RNA, 106 nt, Synthetic construct
  misc_feature 1..106: note = gRNA (spacer + SpCas9)
  source 1..106: mol_type = other RNA
gagccaagagaaacggactggtttaagagctatgctggaaacagcatagcaagtttaaataaggctagtccgttatcaacttgaaaaagtggcaccgagtcggtgc

SEQ ID NO: 499 - RNA, 106 nt, Synthetic construct
  misc_feature 1..106: note = gRNA (spacer + SpCas9)
  source 1..106: mol_type = other RNA
cttcacctctgcacgtcgcagtttaagagctatgctggaaacagcatagcaagtttaaataaggctagtccgttatcaacttgaaaaagtggcaccgagtcggtgc

SEQ ID NO: 500 - RNA, 106 nt, Synthetic construct
  misc_feature 1..106: note = gRNA (spacer + SpCas9)
  source 1..106: mol_type = other RNA
acaatgttccggagactctagtttaagagctatgctggaaacagcatagcaagtttaaataaggctagtccgttatcaacttgaaaaagtggcaccgagtcggtgc

SEQ ID NO: 501 - RNA, 106 nt, Synthetic construct
  misc_feature 1..106: note = gRNA (spacer + SpCas9)
  source 1..106: mol_type = other RNA
tccgcgggattcagcgccgagtttaagagctatgctggaaacagcatagcaagtttaaataaggctagtccgttatcaacttgaaaaagtggcaccgagtcggtgc

SEQ ID NO: 502 - RNA, 106 nt, Synthetic construct
  misc_feature 1..106: note = gRNA (spacer + SpCas9)
  source 1..106: mol_type = other RNA
ttaatgagtgggaggagttggtttaagagctatgctggaaacagcatagcaagtttaaataaggctagtccgttatcaacttgaaaaagtggcaccgagtcggtgc

SEQ ID NO: 503 - RNA, 106 nt, Synthetic construct
  misc_feature 1..106: note = gRNA (spacer + SpCas9)
  source 1..106: mol_type = other RNA
ccaactcaaacaatccagatgtttaagagctatgctggaaacagcatagcaagtttaaataaggctagtccgttatcaacttgaaaaagtggcaccgagtcggtgc

SEQ ID NO: 504 - RNA, 106 nt, Synthetic construct
  misc_feature 1..106: note = gRNA (spacer + SpCas9)
  source 1..106: mol_type = other RNA
gctgccaactggatcctgcggtttaagagctatgctggaaacagcatagcaagtttaaataaggctagtccgttatcaacttgaaaaagtggcaccgagtcggtgc

SEQ ID NO: 505 - RNA, 106 nt, Synthetic construct
  misc_feature 1..106: note = gRNA (spacer + SpCas9)
  source 1..106: mol_type = other RNA
agtctttgaagtatgcctcagtttaagagctatgctggaaacagcatagcaagtttaaataaggctagtccgttatcaacttgaaaaagtggcaccgagtcggtgc

SEQ ID NO: 506 - RNA, 106 nt, Synthetic construct
  misc_feature 1..106: note = gRNA (spacer + SpCas9)
  source 1..106: mol_type = other RNA
tcctgactgccgattggtgggtttaagagctatgctggaaacagcatagcaagtttaaataaggctagtccgttatcaacttgaaaaagtggcaccgagtcggtgc

SEQ ID NO: 507 - RNA, 106 nt, Synthetic construct
  misc_feature 1..106: note = gRNA (spacer + SpCas9)
  source 1..106: mol_type = other RNA
tcttgtcctccaatttgtccgtttaagagctatgctggaaacagcatagcaagtttaaataaggctagtccgttatcaacttgaaaaagtggcaccgagtcggtgc

SEQ ID NO: 508 - RNA, 106 nt, Synthetic construct
  misc_feature 1..106: note = gRNA (spacer + SpCas9)
  source 1..106: mol_type = other RNA
cgataaccaggacaaattgggtttaagagctatgctggaaacagcatagcaagtttaaataaggctagtccgttatcaacttgaaaaagtggcaccgagtcggtgc

SEQ ID NO: 509 - RNA, 106 nt, Synthetic construct
  misc_feature 1..106: note = gRNA (spacer + SpCas9)
  source 1..106: mol_type = other RNA
atttggaagatccagcatccgtttaagagctatgctggaaacagcatagcaagtttaaataaggctagtccgttatcaacttgaaaaagtggcaccgagtcggtgc

SEQ ID NO: 510 - RNA, 106 nt, Synthetic construct
  misc_feature 1..106: note = gRNA (spacer + SpCas9)
  source 1..106: mol_type = other RNA
ctgtttggctttcagttatagtttaagagctatgctggaaacagcatagcaagtttaaataaggctagtccgttatcaacttgaaaaagtggcaccgagtcggtgc

SEQ ID NO: 511 - RNA, 106 nt, Synthetic construct
  misc_feature 1..106: note = gRNA (spacer + SpCas9)
  source 1..106: mol_type = other RNA
ctcctcctgcctccaccaatgtttaagagctatgctggaaacagcatagcaagtttaaataaggctagtccgttatcaacttgaaaaagtggcaccgagtcggtgc

SEQ ID NO: 512 - RNA, 106 nt, Synthetic construct
  misc_feature 1..106: note = gRNA (spacer + SpCas9)
  source 1..106: mol_type = other RNA
gtcatcctcaggccatgcaggtttaagagctatgctggaaacagcatagcaagtttaaataaggctagtccgttatcaacttgaaaaagtggcaccgagtcggtgc

SEQ ID NO: 513 - RNA, 106 nt, Synthetic construct
  misc_feature 1..106: note = gRNA (spacer + SpCas9)
  source 1..106: mol_type = other RNA
ctgccgttccggccgaccacgtttaagagctatgctggaaacagcatagcaagtttaaataaggctagtccgttatcaacttgaaaaagtggcaccgagtcggtgc

SEQ ID NO: 514 - RNA, 106 nt, Synthetic construct
  misc_feature 1..106: note = gRNA (spacer + SpCas9)
  source 1..106: mol_type = other RNA
ccttcctgactgccgattgggtttaagagctatgctggaaacagcatagcaagtttaaataaggctagtccgttatcaacttgaaaaagtggcaccgagtcggtgc

SEQ ID NO: 515 - RNA, 106 nt, Synthetic construct
  misc_feature 1..106: note = gRNA (spacer + SpCas9)
  source 1..106: mol_type = other RNA
acctgcacgactcctgctcagtttaagagctatgctggaaacagcatagcaagtttaaataaggctagtccgttatcaacttgaaaaagtggcaccgagtcggtgc

SEQ ID NO: 516 - RNA, 106 nt, Synthetic construct
  misc_feature 1..106: note = gRNA (spacer + SpCas9)
  source 1..106: mol_type = other RNA
ggcctgtattttcctgctgggtttaagagctatgctggaaacagcatagcaagtttaaataaggctagtccgttatcaacttgaaaaagtggcaccgagtcggtgc

SEQ ID NO: 517 - RNA, 106 nt, Synthetic construct
  misc_feature 1..106: note = gRNA (spacer + SpCas9)
  source 1..106: mol_type = other RNA
aacatagaggttccttgagcgtttaagagctatgctggaaacagcatagcaagtttaaataaggctagtccgttatcaacttgaaaaagtggcaccgagtcggtgc

SEQ ID NO: 518 - RNA, 106 nt, Synthetic construct
  misc_feature 1..106: note = gRNA (spacer + SpCas9)
  source 1..106: mol_type = other RNA
tgccgttccggccgaccacggtttaagagctatgctggaaacagcatagcaagtttaaataaggctagtccgttatcaacttgaaaaagtggcaccgagtcggtgc

SEQ ID NO: 519 - RNA, 106 nt, Synthetic construct
  misc_feature 1..106: note = gRNA (spacer + SpCas9)
  source 1..106: mol_type = other RNA
ataggccatcagcgcatgcggtttaagagctatgctggaaacagcatagcaagtttaaataaggctagtccgttatcaacttgaaaaagtggcaccgagtcggtgc

SEQ ID NO: 520 - RNA, 106 nt, Synthetic construct
  misc_feature 1..106: note = gRNA (spacer + SpCas9)
  source 1..106: mol_type = other RNA
gcctccaccaatcggcagtcgtttaagagctatgctggaaacagcatagcaagtttaaataaggctagtccgttatcaacttgaaaaagtggcaccgagtcggtgc

SEQ ID NO: 521 - RNA, 106 nt, Synthetic construct
  misc_feature 1..106: note = gRNA (spacer + SpCas9)
  source 1..106: mol_type = other RNA
gtcctttgtttacgtcccgtgtttaagagctatgctggaaacagcatagcaagtttaaataaggctagtccgttatcaacttgaaaaagtggcaccgagtcggtgc

SEQ ID NO: 522 - RNA, 106 nt, Synthetic construct
  misc_feature 1..106: note = gRNA (spacer + SpCas9)
  source 1..106: mol_type = other RNA
tgggaacaagagctacagcagtttaagagctatgctggaaacagcatagcaagtttaaataaggctagtccgttatcaacttgaaaaagtggcaccgagtcggtgc

SEQ ID NO: 523 - RNA, 106 nt, Synthetic construct
  misc_feature 1..106: note = gRNA (spacer + SpCas9)
  source 1..106: mol_type = other RNA
ctgtaaacaggcctattgatgtttaagagctatgctggaaacagcatagcaagtttaaataaggctagtccgttatcaacttgaaaaagtggcaccgagtcggtgc

SEQ ID NO: 524 - RNA, 106 nt, Synthetic construct
  misc_feature 1..106: note = gRNA (spacer + SpCas9)
  source 1..106: mol_type = other RNA
gtcgcagaagatctcaatctgtttaagagctatgctggaaacagcatagcaagtttaaataaggctagtccgttatcaacttgaaaaagtggcaccgagtcggtgc

SEQ ID NO: 525 - RNA, 106 nt, Synthetic construct
  misc_feature 1..106: note = gRNA (spacer + SpCas9)
  source 1..106: mol_type = other RNA
ctgccttcctgactgccgatgtttaagagctatgctggaaacagcatagcaagtttaaataaggctagtccgttatcaacttgaaaaagtggcaccgagtcggtgc

SEQ ID NO: 526 - RNA, 106 nt, Synthetic construct
  misc_feature 1..106: note = gRNA (spacer + SpCas9)
  source 1..106: mol_type = other RNA
actactaattccctggatgcgtttaagagctatgctggaaacagcatagcaagtttaaataaggctagtccgttatcaacttgaaaaagtggcaccgagtcggtgc

SEQ ID NO: 527 - RNA, 106 nt, Synthetic construct
  misc_feature 1..106: note = gRNA (spacer + SpCas9)
  source 1..106: mol_type = other RNA
cacatttcttgccttactttgtttaagagctatgctggaaacagcatagcaagtttaaataaggctagtccgttatcaacttgaaaaagtggcaccgagtcggtgc

SEQ ID NO: 528 - RNA, 106 nt, Synthetic construct
  misc_feature 1..106: note = gRNA (spacer + SpCas9)
  source 1..106: mol_type = other RNA
ggatgactgtctcttagagggtttaagagctatgctggaaacagcatagcaagtttaaataaggctagtccgttatcaacttgaaaaagtggcaccgagtcggtgc

SEQ ID NO: 529 - RNA, 106 nt, Synthetic construct
  misc_feature 1..106: note = gRNA (spacer + SpCas9)
  source 1..106: mol_type = other RNA
gctatgcctcatcttcttgtgtttaagagctatgctggaaacagcatagcaagtttaaataaggctagtccgttatcaacttgaaaaagtggcaccgagtcggtgc

SEQ ID NO: 530 - RNA, 106 nt, Synthetic construct
  misc_feature 1..106: note = gRNA (spacer + SpCas9)
  source 1..106: mol_type = other RNA
cccgtcggcgctgaatcccggtttaagagctatgctggaaacagcatagcaagtttaaataaggctagtccgttatcaacttgaaaaagtggcaccgagtcggtgc

SEQ ID NO: 531 - RNA, 106 nt, Synthetic construct
  misc_feature 1..106: note = gRNA (spacer + SpCas9)
  source 1..106: mol_type = other RNA
tagtattccttggactcatagtttaagagctatgctggaaacagcatagcaagtttaaataaggctagtccgttatcaacttgaaaaagtggcaccgagtcggtgc

SEQ ID NO: 532 - RNA, 106 nt, Synthetic construct
  misc_feature 1..106: note = gRNA (spacer + SpCas9)
  source 1..106: mol_type = other RNA
aggtaggagcgggagcattcgtttaagagctatgctggaaacagcatagcaagtttaaataaggctagtccgttatcaacttgaaaaagtggcaccgagtcggtgc

SEQ ID NO: 533 - RNA, 106 nt, Synthetic construct
  misc_feature 1..106: note = gRNA (spacer + SpCas9)
  source 1..106: mol_type = other RNA
tcttttggggtggagccctcgtttaagagctatgctggaaacagcatagcaagtttaaataaggctagtccgttatcaacttgaaaaagtggcaccgagtcggtgc

SEQ ID NO: 534 - RNA, 106 nt, Synthetic construct
  misc_feature 1..106: note = gRNA (spacer + SpCas9)
  source 1..106: mol_type = other RNA
tcagtatgccctgagcctgagtttaagagctatgctggaaacagcatagcaagtttaaataaggctagtccgttatcaacttgaaaaagtggcaccgagtcggtgc

SEQ ID NO: 535 - RNA, 106 nt, Synthetic construct
  misc_feature 1..106: note = gRNA (spacer + SpCas9)
  source 1..106: mol_type = other RNA
tttaatgagtgggaggagttgtttaagagctatgctggaaacagcatagcaagtttaaataaggctagtccgttatcaacttgaaaaagtggcaccgagtcggtgc

SEQ ID NO: 536 - RNA, 106 nt, Synthetic construct
  misc_feature 1..106: note = gRNA (spacer + SpCas9)
  source 1..106: mol_type = other RNA
ctccctcgcctcgcagacgagtttaagagctatgctggaaacagcatagcaagtttaaataaggctagtccgttatcaacttgaaaaagtggcaccgagtcggtgc

SEQ ID NO: 537 - RNA, 106 nt, Synthetic construct
  misc_feature 1..106: note = gRNA (spacer + SpCas9)
  source 1..106: mol_type = other RNA
gataagataggggcatttgggtttaagagctatgctggaaacagcatagcaagtttaaataaggctagtccgttatcaacttgaaaaagtggcaccgagtcggtgc

SEQ ID NO: 538 - RNA, 106 nt, Synthetic construct
  misc_feature 1..106: note = gRNA (spacer + SpCas9)
  source 1..106: mol_type = other RNA
ccgcgggattcagcgccgacgtttaagagctatgctggaaacagcatagcaagtttaaataaggctagtccgttatcaacttgaaaaagtggcaccgagtcggtgc

SEQ ID NO: 539 - RNA, 106 nt, Synthetic construct
  misc_feature 1..106: note = gRNA (spacer + SpCas9)
  source 1..106: mol_type = other RNA
cagcgataaccaggacaaatgtttaagagctatgctggaaacagcatagcaagtttaaataaggctagtccgttatcaacttgaaaaagtggcaccgagtcggtgc

SEQ ID NO: 540 - RNA, 106 nt, Synthetic construct
  misc_feature 1..106: note = gRNA (spacer + SpCas9)
  source 1..106: mol_type = other RNA
caggtaggagtgggagcattgtttaagagctatgctggaaacagcatagcaagtttaaataaggctagtccgttatcaacttgaaaaagtggcaccgagtcggtgc

SEQ ID NO: 541 - RNA, 106 nt, Synthetic construct
  misc_feature 1..106: note = gRNA (spacer + SpCas9)
  source 1..106: mol_type = other RNA
gtttaatgagtgggaggagtgtttaagagctatgctggaaacagcatagcaagtttaaataaggctagtccgttatcaacttgaaaaagtggcaccgagtcggtgc

SEQ ID NO: 542 - RNA, 106 nt, Synthetic construct
  misc_feature 1..106: note = gRNA (spacer + SpCas9)
  source 1..106: mol_type = other RNA
tggtgagtgattggaggttggtttaagagctatgctggaaacagcatagcaagtttaaataaggctagtccgttatcaacttgaaaaagtggcaccgagtcggtgc

SEQ ID NO: 543 - RNA, 106 nt, Synthetic construct
  misc_feature 1..106: note = gRNA (spacer + SpCas9)
  source 1..106: mol_type = other RNA
taatgagtgggaggagttgggtttaagagctatgctggaaacagcatagcaagtttaaataaggctagtccgttatcaacttgaaaaagtggcaccgagtcggtgc

SEQ ID NO: 544 - RNA, 106 nt, Synthetic construct
  misc_feature 1..106: note = gRNA (spacer + SpCas9)
  source 1..106: mol_type = other RNA
actacatgttctggataatagtttaagagctatgctggaaacagcatagcaagtttaaataaggctagtccgttatcaacttgaaaaagtggcaccgagtcggtgc

SEQ ID NO: 545 - RNA, 106 nt, Synthetic construct
  misc_feature 1..106: note = gRNA (spacer + SpCas9)
  source 1..106: mol_type = other RNA
ggcatagcagcaggatgaaggtttaagagctatgctggaaacagcatagcaagtttaaataaggctagtccgttatcaacttgaaaaagtggcaccgagtcggtgc

SEQ ID NO: 546 - RNA, 106 nt, Synthetic construct
  misc_feature 1..106: note = gRNA (spacer + SpCas9)
  source 1..106: mol_type = other RNA
gttgataagataggggcattgtttaagagctatgctggaaacagcatagcaagtttaaataaggctagtccgttatcaacttgaaaaagtggcaccgagtcggtgc

SEQ ID NO: 547 - RNA, 106 nt, Synthetic construct
  misc_feature 1..106: note = gRNA (spacer + SpCas9)
  source 1..106: mol_type = other RNA
tcaacgaattgtgggtctttgtttaagagctatgctggaaacagcatagcaagtttaaataaggctagtccgttatcaacttgaaaaagtggcaccgagtcggtgc

SEQ ID NO: 548 - RNA, 106 nt, Synthetic construct
  misc_feature 1..106: note = gRNA (spacer + SpCas9)
  source 1..106: mol_type = other RNA
tatggatgatgtggtattgggtttaagagctatgctggaaacagcatagcaagtttaaataaggctagtccgttatcaacttgaaaaagtggcaccgagtcggtgc

SEQ ID NO: 549 - RNA, 106 nt, Synthetic construct
  misc_feature 1..106: note = gRNA (spacer + SpCas9)
  source 1..106: mol_type = other RNA
caacgaattgtgggtcttttgtttaagagctatgctggaaacagcatagcaagtttaaataaggctagtccgttatcaacttgaaaaagtggcaccgagtcggtgc

SEQ ID NO: 550 - RNA, 106 nt, Synthetic construct
  misc_feature 1..106: note = gRNA (spacer + SpCas9)
  source 1..106: mol_type = other RNA
catttgttcagtggttcgtagtttaagagctatgctggaaacagcatagcaagtttaaataaggctagtccgttatcaacttgaaaaagtggcaccgagtcggtgc

SEQ ID NO: 551 - RNA, 106 nt, Synthetic construct
  misc_feature 1..106: note = gRNA (spacer + SpCas9)
  source 1..106: mol_type = other RNA
cgtctaacaacagtagtttcgtttaagagctatgctggaaacagcatagcaagtttaaataaggctagtccgttatcaacttgaaaaagtggcaccgagtcggtgc

SEQ ID NO: 552 - RNA, 106 nt, Synthetic construct
  misc_feature 1..106: note = gRNA (spacer + SpCas9)
  source 1..106: mol_type = other RNA
tgcctgagtgctgtatggtggtttaagagctatgctggaaacagcatagcaagtttaaataaggctagtccgttatcaacttgaaaaagtggcaccgagtcggtgc

SEQ ID NO: 553 - RNA, 106 nt, Synthetic construct
  misc_feature 1..106: note = gRNA (spacer + SpCas9)
  source 1..106: mol_type = other RNA
gccccgagacgggtcgtccggtttaagagctatgctggaaacagcatagcaagtttaaataaggctagtccgttatcaacttgaaaaagtggcaccgagtcggtgc

SEQ ID NO: 554 - RNA, 106 nt, Synthetic construct
  misc_feature 1..106: note = gRNA (spacer + SpCas9)
  source 1..106: mol_type = other RNA
gactgccgattggtggaggcgtttaagagctatgctggaaacagcatagcaagtttaaataaggctagtccgttatcaacttgaaaaagtggcaccgagtcggtgc

SEQ ID NO: 555 - RNA, 106 nt, Synthetic construct
  misc_feature 1..106: note = gRNA (spacer + SpCas9)
  source 1..106: mol_type = other RNA
tatatggatgatgtggtattgtttaagagctatgctggaaacagcatagcaagtttaaataaggctagtccgttatcaacttgaaaaagtggcaccgagtcggtgc

SEQ ID NO: 556 - RNA, 106 nt, Synthetic construct
  misc_feature 1..106: note = gRNA (spacer + SpCas9)
  source 1..106: mol_type = other RNA
cttgagtatttggtgtctttgtttaagagctatgctggaaacagcatagcaagtttaaataaggctagtccgttatcaacttgaaaaagtggcaccgagtcggtgc

SEQ ID NO: 557 - RNA, 106 nt, Synthetic construct
  misc_feature 1..106: note = gRNA (spacer + SpCas9)
  source 1..106: mol_type = other RNA
gatctggtgggcgttcacgggtttaagagctatgctggaaacagcatagcaagtttaaataaggctagtccgttatcaacttgaaaaagtggcaccgagtcggtgc

SEQ ID NO: 558 - RNA, 106 nt, Synthetic construct
  misc_feature 1..106: note = gRNA (spacer + SpCas9)
  source 1..106: mol_type = other RNA
agactgggaggagttggggggtttaagagctatgctggaaacagcatagcaagtttaaataaggctagtccgttatcaacttgaaaaagtggcaccgagtcggtgc

SEQ ID NO: 559 - RNA, 106 nt, Synthetic construct
  misc_feature 1..106: note = gRNA (spacer + SpCas9)
  source 1..106: mol_type = other RNA
agtcctcttatgtaagacctgtttaagagctatgctggaaacagcatagcaagtttaaataaggctagtccgttatcaacttgaaaaagtggcaccgagtcggtgc

SEQ ID NO: 560 - RNA, 106 nt, Synthetic construct
  misc_feature 1..106: note = gRNA (spacer + SpCas9)
  source 1..106: mol_type = other RNA
ctcaagatgttgtacagactgtttaagagctatgctggaaacagcatagcaagtttaaataaggctagtccgttatcaacttgaaaaagtggcaccgagtcggtgc

SEQ ID NO: 561 - RNA, 106 nt, Synthetic construct
  misc_feature 1..106: note = gRNA (spacer + SpCas9)
  source 1..106: mol_type = other RNA
gggaacaagagctacagcatgtttaagagctatgctggaaacagcatagcaagtttaaataaggctagtccgttatcaacttgaaaaagtggcaccgagtcggtgc

SEQ ID NO: 562 - RNA, 106 nt, Synthetic construct
  misc_feature 1..106: note = gRNA (spacer + SpCas9)
  source 1..106: mol_type = other RNA
tcgcagaagatctcaatctcgtttaagagctatgctggaaacagcatagcaagtttaaataaggctagtccgttatcaacttgaaaaagtggcaccgagtcggtgc

SEQ ID NO: 563 - RNA, 106 nt, Synthetic construct
  misc_feature 1..106: note = gRNA (spacer + SpCas9)
  source 1..106: mol_type = other RNA
ggggtggagccctcaggctcgtttaagagctatgctggaaacagcatagcaagtttaaataaggctagtccgttatcaacttgaaaaagtggcaccgagtcggtgc

SEQ ID NO: 564 - RNA, 106 nt, Synthetic construct
  misc_feature 1..106: note = gRNA (spacer + SpCas9)
  source 1..106: mol_type = other RNA
tattccttggactcataagggtttaagagctatgctggaaacagcatagcaagtttaaataaggctagtccgttatcaacttgaaaaagtggcaccgagtcggtgc

SEQ ID NO: 565 - RNA, 106 nt, Synthetic construct
  misc_feature 1..106: note = gRNA (spacer + SpCas9)
  source 1..106: mol_type = other RNA
tctaagagacagtcatcctcgtttaagagctatgctggaaacagcatagcaagtttaaataaggctagtccgttatcaacttgaaaaagtggcaccgagtcggtgc

SEQ ID NO: 566 - RNA, 106 nt, Synthetic construct
  misc_feature 1..106: note = gRNA (spacer + SpCas9)
  source 1..106: mol_type = other RNA
caactcaaacaatccagattgtttaagagctatgctggaaacagcatagcaagtttaaataaggctagtccgttatcaacttgaaaaagtggcaccgagtcggtgc

SEQ ID NO: 567 - RNA, 106 nt, Synthetic construct
  misc_feature 1..106: note = gRNA (spacer + SpCas9)
  source 1..106: mol_type = other RNA
aaacaaaggacgtcccgcgcgtttaagagctatgctggaaacagcatagcaagtttaaataaggctagtccgttatcaacttgaaaaagtggcaccgagtcggtgc

SEQ ID NO: 568 - RNA, 106 nt, Synthetic construct
  misc_feature 1..106: note = gRNA (spacer + SpCas9)
  source 1..106: mol_type = other RNA
ctgccaactggatcctgcgcgtttaagagctatgctggaaacagcatagcaagtttaaataaggctagtccgttatcaacttgaaaaagtggcaccgagtcggtgc

SEQ ID NO: 569 - RNA, 106 nt, Synthetic construct
  misc_feature 1..106: note = gRNA (spacer + SpCas9)
  source 1..106: mol_type = other RNA
gaagctccaaattctttatagtttaagagctatgctggaaacagcatagcaagtttaaataaggctagtccgttatcaacttgaaaaagtggcaccgagtcggtgc

SEQ ID NO: 570 - RNA, 106 nt, Synthetic construct
  misc_feature 1..106: note = gRNA (spacer + SpCas9)
  source 1..106: mol_type = other RNA
gtcagtatgccctgagcctggtttaagagctatgctggaaacagcatagcaagtttaaataaggctagtccgttatcaacttgaaaaagtggcaccgagtcggtgc

SEQ ID NO: 571 - RNA, 106 nt, Synthetic construct
  misc_feature 1..106: note = gRNA (spacer + SpCas9)
  source 1..106: mol_type = other RNA
tttcccaccttatgagtccagtttaagagctatgctggaaacagcatagcaagtttaaataaggctagtccgttatcaacttgaaaaagtggcaccgagtcggtgc

SEQ ID NO: 572 - RNA, 106 nt, Synthetic construct
  misc_feature 1..106: note = gRNA (spacer + SpCas9)
  source 1..106: mol_type = other RNA
acaagaggttggtgagtgatgtttaagagctatgctggaaacagcatagcaagtttaaataaggctagtccgttatcaacttgaaaaagtggcaccgagtcggtgc

SEQ ID NO: 573 - RNA, 106 nt, Synthetic construct
  misc_feature 1..106: note = gRNA (spacer + SpCas9)
  source 1..106: mol_type = other RNA
gaaagcccaagatgatgggagtttaagagctatgctggaaacagcatagcaagtttaaataaggctagtccgttatcaacttgaaaaagtggcaccgagtcggtgc

SEQ ID NO: 574 - RNA, 106 nt, Synthetic construct
  misc_feature 1..106: note = gRNA (spacer + SpCas9)
  source 1..106: mol_type = other RNA
aggttccacgcatgcgctgagtttaagagctatgctggaaacagcatagcaagtttaaataaggctagtccgttatcaacttgaaaaagtggcaccgagtcggtgc

SEQ ID NO: 575 - RNA, 106 nt, Synthetic construct
  misc_feature 1..106: note = gRNA (spacer + SpCas9)
  source 1..106: mol_type = other RNA
ttggtgagtgattggaggttgtttaagagctatgctggaaacagcatagcaagtttaaataaggctagtccgttatcaacttgaaaaagtggcaccgagtcggtgc

SEQ ID NO: 576 - RNA, 106 nt, Synthetic construct
  misc_feature 1..106: note = gRNA (spacer + SpCas9)
  source 1..106: mol_type = other RNA
agagctacagcatgggaggtgtttaagagctatgctggaaacagcatagcaagtttaaataaggctagtccgttatcaacttgaaaaagtggcaccgagtcggtgc

SEQ ID NO: 577 - RNA, 106 nt, Synthetic construct
  misc_feature 1..106: note = gRNA (spacer + SpCas9)
  source 1..106: mol_type = other RNA
atatggatgatgtggtattggtttaagagctatgctggaaacagcatagcaagtttaaataaggctagtccgttatcaacttgaaaaagtggcaccgagtcggtgc

SEQ ID NO: 578 - RNA, 106 nt, Synthetic construct
  misc_feature 1..106: note = gRNA (spacer + SpCas9)
  source 1..106: mol_type = other RNA
ccatttgttcagtggttcgtgtttaagagctatgctggaaacagcatagcaagtttaaataaggctagtccgttatcaacttgaaaaagtggcaccgagtcggtgc

SEQ ID NO: 579 - RNA, 106 nt, Synthetic construct
  misc_feature 1..106: note = gRNA (spacer + SpCas9)
  source 1..106: mol_type = other RNA
ttatatggatgatgtggtatgtttaagagctatgctggaaacagcatagcaagtttaaataaggctagtccgttatcaacttgaaaaagtggcaccgagtcggtgc

SEQ ID NO: 580 - RNA, 106 nt, Synthetic construct
  misc_feature 1..106: note = gRNA (spacer + SpCas9)
  source 1..106: mol_type = other RNA
ggagtgggagcattcgggccgtttaagagctatgctggaaacagcatagcaagtttaaataaggctagtccgttatcaacttgaaaaagtggcaccgagtcggtgc

SEQ ID NO: 581 - RNA, 106 nt, Synthetic construct
  misc_feature 1..106: note = gRNA (spacer + SpCas9)
  source 1..106: mol_type = other RNA
atttggtgtcttttggagtggtttaagagctatgctggaaacagcatagcaagtttaaataaggctagtccgttatcaacttgaaaaagtggcaccgagtcggtgc

SEQ ID NO: 582 - RNA, 106 nt, Synthetic construct
  misc_feature 1..106: note = gRNA (spacer + SpCas9)
  source 1..106: mol_type = other RNA
cacagaaaggccttgtaagtgtttaagagctatgctggaaacagcatagcaagtttaaataaggctagtccgttatcaacttgaaaaagtggcaccgagtcggtgc

SEQ ID NO: 583 - RNA, 106 nt, Synthetic construct
  misc_feature 1..106: note = gRNA (spacer + SpCas9)
  source 1..106: mol_type = other RNA
accaattttcttttgtctttgtttaagagctatgctggaaacagcatagcaagtttaaataaggctagtccgttatcaacttgaaaaagtggcaccgagtcggtgc

SEQ ID NO: 584 - RNA, 106 nt, Synthetic construct
  misc_feature 1..106: note = gRNA (spacer + SpCas9)
  source 1..106: mol_type = other RNA
aggttaatggtctttgtactgtttaagagctatgctggaaacagcatagcaagtttaaataaggctagtccgttatcaacttgaaaaagtggcaccgagtcggtgc

SEQ ID NO: 585 - RNA, 106 nt, Synthetic construct
  misc_feature 1..106: note = gRNA (spacer + SpCas9)
  source 1..106: mol_type = other RNA
taccaattttcttttgtcttgtttaagagctatgctggaaacagcatagcaagtttaaataaggctagtccgttatcaacttgaaaaagtggcaccgagtcggtgc

SEQ ID NO: 586 - DNA, 86 bp, synthetic construct
  source 1..86: mol_type = other DNA
  misc_feature 1..86: note = SpCas9 gRNA scaffold sequence (DNA)
gtttaagagctatgctggaaacagcatagcaagtttaaataaggctagtccgttatcaacttgaaaaagtggcaccgagtcggtgc

SEQ ID NO: 587 - RNA, 86 nt, Synthetic construct
  misc_feature 1..86: note = SpCas9 gRNA scaffold sequence (RNA)
  source 1..86: mol_type = other RNA
gtttaagagctatgctggaaacagcatagcaagtttaaataaggctagtccgttatcaacttgaaaaagtggcaccgagtcggtgc

SEQ ID NO: 588 - skipped

SEQ ID NO: 589 - protein, 6 aa, Staphylococcus aureus
  REGION 1..6: note = S. aureus Cas9 protospacer adjacent motif
NNGRRT

SEQ ID NO: 590 - protein, 65 aa, Synthetic construct
  REGION 1..65: note = KRAB (AA)
RTLVTFKDVFVDFTREEWKLLDTAQQILYRNVMLENYKNLVSLGYQLTKPDVILRLEKGEEPWLV

SEQ ID NO: 591 - DNA, 195 bp, Synthetic construct
  misc_feature 1..195: note = KRAB (nt)
  source 1..195: mol_type = other DNA
cggacactggtgaccttcaaggatgtgtttgtggacttcaccagggaggagtggaagctgctggacactgctcagcagatcctgtacagaaatgtgatgctggagaactataagaacctggtttccttgggttatcagcttactaagccagatgtgatcctccggttggagaagggagaagagccctggctggtg

SEQ ID NO: 592 - protein, 16 aa, Synthetic construct
  REGION 1..16: note = NLS (AA)
KRPAATKKAGQAKKKK

SEQ ID NO: 593 - protein, 7 aa, Synthetic construct
  REGION 1..7: note = NLS-2 (AA)
PKKKRKV

SEQ ID NO: 594 - DNA, 4509 bp, Synthetic construct
  misc_feature 1..4509: note = NLS2-dSpCas9-NLS-KRAB-NLS2 (nt)
  source 1..4509: mol_type = other DNA
ccaaagaagaagcggaaggtcggtatccacggagtcccagcagccgacaagaagtactccattgggctcgccatcggcacaaacagcgtcggctgggccgtcattacggacgagtacaaggtgccgagcaaaaaattcaaagttctgggcaataccgatcgccacagcataaagaagaacctcattggcgccctcctgttcgactccggggaaaccgccgaagccacgcggctcaaaagaacagcacggcgcagatatacccgcagaaagaatcggatctgctacctgcaggagatctttagtaatgagatggctaaggtggatgactctttcttccataggctggaggagtcctttttggtggaggaggataaaaagcacgagcgccacccaatctttggcaatatcgtggacgaggtggcgtaccatgaaaagtacccaaccatatatcatctgaggaagaagcttgtagacagtactgataaggctgacttgcggttgatctatctcgcgctggcgcatatgatcaaatttcggggacacttcctcatcgagggggacctgaacccagacaacagcgatgtcgacaaactctttatccaactggttcagacttacaatcagcttttcgaagagaacccgatcaacgcatccggagttgacgccaaagcaatcctgagcgctaggctgtccaaatcccggcggctcgaaaacctcatcgcacagctccctggggagaagaagaacggcctgtttggtaatcttatcgccctgtcactcgggctgacccccaactttaaatctaacttcgacctggccgaagatgccaagcttcaactgagcaaagacacctacgatgatgatctcgacaatctgctggcccagatcggcgaccagtacgcagacctttttttggcggcaaagaacctgtcagacgccattctgctgagtgatattctgcgagtgaacacggagatcaccaaagctccgctgagcgctagtatgatcaagcgctatgatgagcaccaccaagacttgactttgctgaaggcccttgtcagacagcaactgcctgagaagtacaaggaaattttcttcgatcagtctaaaaatggctacgccggatacattgacggcggagcaagccaggaggaattttacaaatttattaagcccatcttggaaaaaatggacggcaccgaggagctgctggtaaagcttaacagagaagatctgttgcgcaaacagcgcactttcgacaatggaagcatcccccaccagattcacctgggcgaactgcacgctatcctcaggcggcaagaggatttctacccctttttgaaagataacagggaaaagattgagaaaatcctcacatttcggataccctactatgtaggccccctcgcccggggaaattccagattcgcgtggatgactcgcaaatcagaagagaccatcactccctggaacttcgaggaagtcgtggataagggggcctctgcccagtccttcatcgaaaggatgactaactttgataaaaatctgcctaacgaaaaggtgcttcctaaacactctctgctgtacgagtacttcacagtttataacgagctcaccaaggtcaaatacgtcacagaagggatgagaaagccagcattcctgtctggagagcagaagaaagctatcgtggacctcctcttcaagacgaaccggaaagttaccgtgaaacagctcaaagaagactatttcaaaaagattgaatgtttcgactctgttgaaatcagcggagtggaggatcgcttcaacgcatccctgggaacgtatcacgatctcctgaaaatcattaaagacaaggacttcctggacaatgaggagaacgaggacattcttgaggacattgtcctcacccttacgttgtttgaagatagggagatgattgaagaacgcttgaaaacttacgctcatctcttcgacgacaaagtcatgaaacagctcaagaggcgccgatatacaggatgggggcggctgtcaagaaaactgatcaatgggatccgagacaagcagagtggaaagacaatcctggattttcttaagtccgatggatttgccaaccggaacttcatgcagttgatccatgatgactctctcacctttaaggaggacatccagaaagcacaagtttctggccagggggacagtcttcacgagcacatcgctaatcttgcaggtagcccagctatcaaaaagggaatactgcagaccgttaaggtcgtggatgaactcgtcaaagtaatgggaaggcataagcccgagaatatcgttatcgagatggcccgagagaaccaaactacccagaagggacagaagaacagtagggaaaggatgaagaggattgaagagggtataaaagaactggggtcccaaatccttaaggaacacccagttgaaaacacccagcttcagaatgagaagctctacctgtactacctgcagaacggcagggacatgtacgtggatcaggaactggacatcaatcggctctccgactacgacgtggatgccatcgtgccccagtcttttctcaaagatgattctattgataataaagtgttgacaagatccgataaaaatagagggaagagtgataacgtcccctcagaagaagttgtcaagaaaatgaaaaattattggcggcagctgctgaacgccaaactgatcacacaacggaagttcgataatctgactaaggctgaacgaggtggcctgtctgagttggataaagccggcttcatcaaaaggcagcttgttgagacacgccagatcaccaagcacgtggcccaaattctcgattcacgcatgaacaccaagtacgatgaaaatgacaaactgattcgagaggtgaaagttattactctgaagtctaagctggtctcagatttcagaaaggactttcagttttataaggtgagagagatcaacaattaccaccatgcgcatgatgcctacctgaatgcagtggtaggcactgcacttatcaaaaaatatcccaagcttgaatctgaatttgtttacggagactataaagtgtacgatgttaggaaaatgatcgcaaagtctgagcaggaaataggcaaggccaccgctaagtacttcttttacagcaatattatgaattttttcaagaccgagattacactggccaatggagagattcggaagcgaccacttatcgaaacaaacggagaaacaggagaaatcgtgtgggacaagggtagggatttcgcgacagtccggaaggtcctgtccatgccgcaggtgaacatcgttaaaaagaccgaagtacagaccggaggcttctccaaggaaagtatcctcccgaaaaggaacagcgacaagctgatcgcacgcaaaaaagattgggaccccaagaaatacggcggattcgattctcctacagtcgcttacagtgtactggttgtggccaaagtggagaaagggaagtctaaaaaactcaaaagcgtcaaggaactgctgggcatcacaatcatggagcgatcaagcttcgaaaaaaaccccatcgactttctcgaggcgaaaggatataaagaggtcaaaaaagacctcatcattaagcttcccaagtactctctctttgagcttgaaaacggccggaaacgaatgctcgctagtgcgggcgagctgcagaaaggtaacgagctggcactgccctctaaatacgttaatttcttgtatctggccagccactatgaaaagctcaaagggtctcccgaagataatgagcagaagcagctgttcgtggaacaacacaaacactaccttgatgagatcatcgagcaaataagcgaattctccaaaagagtgatcctcgccgacgctaacctcgataaggtgctttctgcttacaataagcacagggataagcccatcagggagcaggcagaaaacattatccacttgtttactctgaccaacttgggcgcgcctgcagccttcaagtacttcgacaccaccatagacagaaagcggtacacctctacaaaggaggtcctggacgccacactgattcatcagtcaattacggggctctatgaaacaagaatcgacctctctcagctcggtggagacaaaaggccggcggccacgaaaaaggccggccaggcaaaaaagaaaaaggctagcgatgctaagtcactgactgcctggtcccggacactggtgaccttcaaggatgtgtttgtggacttcaccagggaggagtggaagctgctggacactgctcagcagatcctgtacagaaatgtgatgctggagaactataagaacctggtttccttgggttatcagcttactaagccagatgtgatcctccggttggagaagggagaagagccctggctggtggagagagaaattcaccaagagacccatcctgattcagagactgcatttgaaatcaaatcatcagttccgaaaaagaaacgcaaagtt

SEQ ID NO: 595 - protein, 1503 aa, Synthetic construct
  REGION 1..1503: note = NLS2-dSpCas9-NLS-KRAB-NLS2 (AA)
PKKKRKVGIHGVPAADKKYSIGLAIGTNSVGWAVITDEYKVPSKKFKVLGNTDRHSIKKNLIGALLFDSGETAEATRLKRTARRRYTRRKNRICYLQEIFSNEMAKVDDSFFHRLEESFLVEEDKKHERHPIFGNIVDEVAYHEKYPTIYHLRKKLVDSTDKADLRLIYLALAHMIKFRGHFLIEGDLNPDNSDVDKLFIQLVQTYNQLFEENPINASGVDAKAILSARLSKSRRLENLIAQLPGEKKNGLFGNLIALSLGLTPNFKSNFDLAEDAKLQLSKDTYDDDLDNLLAQIGDQYADLFLAAKNLSDAILLSDILRVNTEITKAPLSASMIKRYDEHHQDLTLLKALVRQQLPEKYKEIFFDQSKNGYAGYIDGGASQEEFYKFIKPILEKMDGTEELLVKLNREDLLRKQRTFDNGSIPHQIHLGELHAILRRQEDFYPFLKDNREKIEKILTFRIPYYVGPLARGNSRFAWMTRKSEETITPWNFEEVVDKGASAQSFIERMTNFDKNLPNEKVLPKHSLLYEYFTVYNELTKVKYVTEGMRKPAFLSGEQKKAIVDLLFKTNRKVTVKQLKEDYFKKIECFDSVEISGVEDRFNASLGTYHDLLKIIKDKDFLDNEENEDILEDIVLTLTLFEDREMIEERLKTYAHLFDDKVMKQLKRRRYTGWGRLSRKLINGIRDKQSGKTILDFLKSDGFANRNFMQLIHDDSLTFKEDIQKAQVSGQGDSLHEHIANLAGSPAIKKGILQTVKVVDELVKVMGRHKPENIVIEMARENQTTQKGQKNSRERMKRIEEGIKELGSQILKEHPVENTQLQNEKLYLYYLQNGRDMYVDQELDINRLSDYDVDAIVPQSFLKDDSIDNKVLTRSDKNRGKSDNVPSEEVVKKMKNYWRQLLNAKLITQRKFDNLTKAERGGLSELDKAGFIKRQLVETRQITKHVAQILDSRMNTKYDENDKLIREVKVITLKSKLVSDFRKDFQFYKVREINNYHHAHDAYLNAVVGTALIKKYPKLESEFVYGDYKVYDVRKMIAKSEQEIGKATAKYFFYSNIMNFFKTEITLANGEIRKRPLIETNGETGEIVWDKGRDFATVRKVLSMPQVNIVKKTEVQTGGFSKESILPKRNSDKLIARKKDWDPKKYGGFDSPTVAYSVLVVAKVEKGKSKKLKSVKELLGITIMERSSFEKNPIDFLEAKGYKEVKKDLIIKLPKYSLFELENGRKRMLASAGELQKGNELALPSKYVNFLYLASHYEKLKGSPEDNEQKQLFVEQHKHYLDEIIEQISEFSKRVILADANLDKVLSAYNKHRDKPIREQAENIIHLFTLTNLGAPAAFKYFDTTIDRKRYTSTKEVLDATLIHQSITGLYETRIDLSQLGGDKRPAATKKAGQAKKKKASDAKSLTAWSRTLVTFKDVFVDFTREEWKLLDTAQQILYRNVMLENYKNLVSLGYQLTKPDVILRLEKGEEPWLVEREIHQETHPDSETAFEIKSSVPKKKRKV

SEQ ID NO: 596 - protein, 1053 aa, Synthetic construct
  REGION 1..1053: note = SaCas9 (AA)
MKRNYILGLDIGITSVGYGIIDYETRDVIDAGVRLFKEANVENNEGRRSKRGARRLKRRRRHRIQRVKKLLFDYNLLTDHSELSGINPYEARVKGLSQKLSEEEFSAALLHLAKRRGVHNVNEVEEDTGNELSTKEQISRNSKALEEKYVAELQLERLKKDGEVRGSINRFKTSDYVKEAKQLLKVQKAYHQLDQSFIDTYIDLLETRRTYYEGPGEGSPFGWKDIKEWYEMLMGHCTYFPEELRSVKYAYNADLYNALNDLNNLVITRDENEKLEYYEKFQIIENVFKQKKKPTLKQIAKEILVNEEDIKGYRVTSTGKPEFTNLKVYHDIKDITARKEIIENAELLDQIAKILTIYQSSEDIQEELTNLNSELTQEEIEQISNLKGYTGTHNLSLKAINLILDELWHTNDNQIAIFNRLKLVPKKVDLSQQKEIPTTLVDDFILSPVVKRSFIQSIKVINAIIKKYGLPNDIIIELAREKNSKDAQKMINEMQKRNRQTNERIEEIIRTTGKENAKYLIEKIKLHDMQEGKCLYSLEAIPLEDLLNNPFNYEVDHIIPRSVSFDNSFNNKVLVKQEENSKKGNRTPFQYLSSSDSKISYETFKKHILNLAKGKGRISKTKKEYLLEERDINRFSVQKDFINRNLVDTRYATRGLMNLLRSYFRVNNLDVKVKSINGGFTSFLRRKWKFKKERNKGYKHHAEDALIIANADFIFKEWKKLDKAKKVMENQMFEEKQAESMPEIETEQEYKEIFITPHQIKHIKDFKDYKYSHRVDKKPNRELINDTLYSTRKDDKGNTLIVNNLNGLYDKDNDKLKKLINKSPEKLLMYHHDPQTYQKLKLIMEQYGDEKNPLYKYYEETGNYLTKYSKKDNGPVIKKIKYYGNKLNAHLDITDDYPNSRNKVVKLSLKPYRFDVYLDNGVYKFVTVKNLDVIKKENYYEVNSKCYEEAKKLKKISNQAEFIASFYNNDLIKINGELYRVIGVNNDLLNRIEVNMIDITYREYLENMNDKRPPRIIKTIASKTQSIKKYSTDILGNLYEVKSKKHPQIIKKG

SEQ ID NO: 597 - protein, 1052 aa, Synthetic construct
  REGION 1..1052: note = dSaCas9 (AA)
KRNYILGLAIGITSVGYGIIDYETRDVIDAGVRLFKEANVENNEGRRSKRGARRLKRRRRHRIQRVKKLLFDYNLLTDHSELSGINPYEARVKGLSQKLSEEEFSAALLHLAKRRGVHNVNEVEEDTGNELSTKEQISRNSKALEEKYVAELQLERLKKDGEVRGSINRFKTSDYVKEAKQLLKVQKAYHQLDQSFIDTYIDLLETRRTYYEGPGEGSPFGWKDIKEWYEMLMGHCTYFPEELRSVKYAYNADLYNALNDLNNLVITRDENEKLEYYEKFQIIENVFKQKKKPTLKQIAKEILVNEEDIKGYRVTSTGKPEFTNLKVYHDIKDITARKEIIENAELLDQIAKILTIYQSSEDIQEELTNLNSELTQEEIEQISNLKGYTGTHNLSLKAINLILDELWHTNDNQIAIFNRLKLVPKKVDLSQQKEIPTTLVDDFILSPVVKRSFIQSIKVINAIIKKYGLPNDIIIELAREKNSKDAQKMINEMQKRNRQTNERIEEIIRTTGKENAKYLIEKIKLHDMQEGKCLYSLEAIPLEDLLNNPFNYEVDHIIPRSVSFDNSFNNKVLVKQEEASKKGNRTPFQYLSSSDSKISYETFKKHILNLAKGKGRISKTKKEYLLEERDINRFSVQKDFINRNLVDTRYATRGLMNLLRSYFRVNNLDVKVKSINGGFTSFLRRKWKFKKERNKGYKHHAEDALIIANADFIFKEWKKLDKAKKVMENQMFEEKQAESMPEIETEQEYKEIFITPHQIKHIKDFKDYKYSHRVDKKPNRELINDTLYSTRKDDKGNTLIVNNLNGLYDKDNDKLKKLINKSPEKLLMYHHDPQTYQKLKLIMEQYGDEKNPLYKYYEETGNYLTKYSKKDNGPVIKKIKYYGNKLNAHLDITDDYPNSRNKVVKLSLKPYRFDVYLDNGVYKFVTVKNLDVIKKENYYEVNSKCYEEAKKLKKISNQAEFIASFYNNDLIKINGELYRVIGVNNDLLNRIEVNMIDITYREYLENMNDKRPPRIIKTIASKTQSIKKYSTDILGNLYEVKSKKHPQIIKKG

SEQ ID NO: 598 - protein, 1368 aa, Synthetic construct [sequence omitted]

SEQ ID NO: 599 - protein, 1367 aa, Synthetic construct
  REGION 1..1367: note = dSpCas9 (AA)
DKKYSIGLAIGTNSVGWAVITDEYKVPSKKFKVLGNTDRHSIKKNLIGALLFDSGETAEATRLKRTARRRYTRRKNRICYLQEIFSNEMAKVDDSFFHRLEESFLVEEDKKHERHPIFGNIVDEVAYHEKYPTIYHLRKKLVDSTDKADLRLIYLALAHMIKFRGHFLIEGDLNPDNSDVDKLFIQLVQTYNQLFEENPINASGVDAKAILSARLSKSRRLENLIAQLPGEKKNGLFGNLIALSLGLTPNFKSNFDLAEDAKLQLSKDTYDDDLDNLLAQIGDQYADLFLAAKNLSDAILLSDILRVNTEITKAPLSASMIKRYDEHHQDLTLLKALVRQQLPEKYKEIFFDQSKNGYAGYIDGGASQEEFYKFIKPILEKMDGTEELLVKLNREDLLRKQRTFDNGSIPHQIHLGELHAILRRQEDFYPFLKDNREKIEKILTFRIPYYVGPLARGNSRFAWMTRKSEETITPWNFEEVVDKGASAQSFIERMTNFDKNLPNEKVLPKHSLLYEYFTVYNELTKVKYVTEGMRKPAFLSGEQKKAIVDLLFKTNRKVTVKQLKEDYFKKIECFDSVEISGVEDRFNASLGTYHDLLKIIKDKDFLDNEENEDILEDIVLTLTLFEDREMIEERLKTYAHLFDDKVMKQLKRRRYTGWGRLSRKLINGIRDKQSGKTILDFLKSDGFANRNFMQLIHDDSLTFKEDIQKAQVSGQGDSLHEHIANLAGSPAIKKGILQTVKVVDELVKVMGRHKPENIVIEMARENQTTQKGQKNSRERMKRIEEGIKELGSQILKEHPVENTQLQNEKLYLYYLQNGRDMYVDQELDINRLSDYDVDAIVPQSFLKDDSIDNKVLTRSDKNRGKSDNVPSEEVVKKMKNYWRQLLNAKLITQRKFDNLTKAERGGLSELDKAGFIKRQLVETRQITKHVAQILDSRMNTKYDENDKLIREVKVITLKSKLVSDFRKDFQFYKVREINNYHHAHDAYLNAVVGTALIKKYPKLESEFVYGDYKVYDVRKMIAKSEQEIGKATAKYFFYSNIMNFFKTEITLANGEIRKRPLIETNGETGEIVWDKGRDFATVRKVLSMPQVNIVKKTEVQTGGFSKESILPKRNSDKLIARKKDWDPKKYGGFDSPTVAYSVLVVAKVEKGKSKKLKSVKELLGITIMERSSFEKNPIDFLEAKGYKEVKKDLIIKLPKYSLFELENGRKRMLASAGELQKGNELALPSKYVNFLYLASHYEKLKGSPEDNEQKQLFVEQHKHYLDEIIEQISEFSKRVILADANLDKVLSAYNKHRDKPIREQAENIIHLFTLTNLGAPAAFKYFDTTIDRKRYTSTKEVLDATLIHQSITGLYETRIDLSQLGGD

SEQ ID NO: 600 - protein, 548 aa, Synthetic construct
  REGION 1..548: note = ERF domain (AA)
MKTPADTGFAFPDWAYKPESSPGSRQIQLWHFILELLRKEEYQGVIAWQGDYGEFVIKDPDEVARLWGVRKCKPQMNYDKLSRALRYYYNKRILHKTKGKRFTYKFNFNKLVLVNYPFIDVGLAGGAVPQSAPPVPSGGSHFRFPPSTPSEVLSPTEDPRSPPACSSSSSSLFSAVVARRLGRGSVSDCSDGTSELEEPLGEDPRARPPGPPDLGAFRGPPLARLPHDPGVFRVYPRPRGGPEPLSPFPVSPLAGPGSLLPPQLSPALPMTPTHLAYTPSPTLSPMYPSGGGGPSGSGGGSHFSFSPEDMKRYLQAHTQSVYNYHLSPRAFLHYPGLVVPQPQRPDKCPLPPMAPETPPVPSSASSSSSSSSSPFKFKLQPPPLGRRQRAAGEKAVAGADKSGGSAGGLAEGAGALAPPPPPPQIKVEPISEGESEEVEVTDISDEDEEDGEVFKTPRAPPAPPKPEPGEAPGASQCMPLKLRFKRRWSEDCRLEGGGGPAGGFEDEGEDKKVRGEGPGEAGGPLTPRRVSSDLQHATAQLSLEHRDS

SEQ ID NO: 601 - protein, 228 aa, Synthetic construct
  REGION 1..228: note = MXI1 domain (AA)
MERVKMINVQRLLEAAEFLERRERECEHGYASSFPSMPSPRLQHSKPPRRLSRAQKHSSGSSNTSTANRSTHNELEKNRRAHLRLCLERLKVLIPLGPDCTRHTTLGLLNKAKAHIKKLEEAERKSQHQLENLEREQRFLKWRLEQLQGPQEMERIRMDSIGSTISSDRSDSEREEIEVDVESTEFSHGEVDNISTTSISDIDDHSSLPSIGSDEGYSSASVKLSFTS

SEQ ID NO: 602 - protein, 144 aa, Synthetic construct
  REGION 1..144: note = SID4X domain (AA)
ASPKKKRKVEASGSGMNIQMLLEAADYLERREREAEHGYASMLPGSGMNIQMLLEAADYLERREREAEHGYASMLPGSGMNIQMLLEAADYLERREREAEHGYASMLPGSGMNIQMLLEAADYLERREREAEHGYASMLPSRSR

SEQ ID NO: 603 - protein, 220 aa, Synthetic construct
  REGION 1..220: note = MAD-SID domain (AA)
MAAAVRMNIQMLLEAADYLERREREAEHGYASMLPYNNKDRDALKRRNKSKKNNSSSRSTHNEMEKNRRAHLRLCLEKLKGLVPLGPESSRHTTLSLLTKAKLHIKKLEDCDRKAVHQIDQLQREQRHLKRQLEKLGIERIRMDSIGSTVSSERSDSDREEIDVDVESTDYLTGDLDWSSSSVSDSDERGSMQSLGSDEGYSSTSIKRIKLQDSHKACLG

SEQ ID NO: 604 - protein, 910 aa, Synthetic construct
  REGION 1..910: note = DNMT3A (AA)
MPAMPSSGPGDTSSSAAEREEDRKDGEEQEEPRGKEERQEPSTTARKVGRPGRKRKHPPVESGDTPKDPAVISKSPSMAQDSGASELLPNGDLEKRSEPQPEEGSPAGGQKGGAPAEGEGAAETLPEASRAVENGCCTPKEGRGAPAEAGKEQKETNIESMKMEGSRGRLRGGLGWESSLRQRPMPRLTFQAGDPYYISKRKRDEWLARWKREAEKKAKVIAGMNAVEENQGPGESQKVEEASPPAVQQPTDPASPTVATTPEPVGSDAGDKNATKAGDDEPEYEDGRGFGIGELVWGKLRGFSWWPGRIVSWWMTGRSRAAEGTRWVMWFGDGKFSVVCVEKLMPLSSFCSAFHQATYNKQPMYRKAIYEVLQVASSRAGKLFPVCHDSDESDTAKAVEVQNKPMIEWALGGFQPSGPKGLEPPEEEKNPYKEVYTDMWVEPEAAAYAPPPPAKKPRKSTAEKPKVKEIIDERTRERLVYEVRQKCRNIEDICISCGSLNVTLEHPLFVGGMCQNCKNCFLECAYQYDDDGYQSYCTICCGGREVLMCGNNNCCRCFCVECVDLLVGPGAAQAAIKEDPWNCYMCGHKGTYGLLRRREDWPSRLQMFFANNHDQEFDPPKVYPPVPAEKRKPIRVLSLFDGIATGLLVLKDLGIQVDRYIASEVCEDSITVGMVRHQGKIMYVGDVRSVTQKHIQEWGPFDLVIGGSPCNDLSIVNPARKGLYEGTGRLFFEFYRLLHDARPKEGDDRPFFWLFENVVAMGVSDKRDISRFLESNPVMIDAKEVSAAHRARYFWGNLPGMNRPLASTVNDKLELQECLEHGRIAKFSKVRTITTRSNSIKQGKDQHFPVFMNEKEDILWCTEMERVFGFPVHYTDVSNMSRLARQRLLGRSWSVPVIRHLFAPLKEYFA

SEQ ID NO: 605 - protein, 853 aa, Synthetic construct
  REGION 1..853: note = DNMT3B (AA)
MKGDTRHLNGEEDAGGREDSILVNGACSDQSSDSPPILEAIRTPEIRGRRSSSRLSKREVSSLLSYTQDLTGDGDGEDGDGSDTPVMPKLFRETRTRSESPAVRTRNNNSVSSRERHRPSPRSTRGRQGRNHVDESPVEFPATRSLRRRATASAGTPWPSPPSSYLTIDLTDDTEDTHGTPQSSSTPYARLAQDSQQGGMESPQVEADSGDGDSSEYQDGKEFGIGDLVWGKIKGFSWWPAMVVSWKATSKRQAMSGMRWVQWFGDGKFSEVSADKLVALGLFSQHFNLATFNKLVSYRKAMYHALEKARVRAGKTFPSSPGDSLEDQLKPMLEWAHGGFKPTGIEGLKPNNTQPVVNKSKVRRAGSRKLESRKYENKTRRRTADDSATSDYCPAPKRLKTNCYNNGKDRGDEDQSREQMASDVANNKSSLEDGCLSCGRKNPVSFHPLFEGGLCQTCRDRFLELFYMYDDDGYQSYCTVCCEGRELLLCSNTSCCRCFCVECLEVLVGTGTAAEAKLQEPWSCYMCLPQRCHGVLRRRKDWNVRLQAFFTSDTGLEYEAPKLYPAIPAARRRPIRVLSLFDGIATGYLVLKELGIKVGKYVASEVCEESIAVGTVKHEGNIKYVNDVRNITKKNIEEWGPFDLVIGGSPCNDLSNVNPARKGLYEGTGRLFFEFYHLLNYSRPKEGDDRPFFWMFENVVAMKVGDKRDISRFLECNPVMIDAIKVSAAHRARYFWGNLPGMNRPVIASKNDKLELQDCLEYNRIAKLKKVQTITTKSNSIKQGKNQLFPVVMNGKEDVLWCTELERIFGFPVHYTDVSNMGRGARQKLLGRSWSVPVIRHLFAPLKDYFACE

SEQ ID NO: 606 - protein, 852 aa, Synthetic construct
  REGION 1..852: note = LSD1 (AA)
MLSGKKAAAAAAAAAAAATGTEAGPGTAGGSENGSEVAAQPAGLSGPAEVGPGAVGERTPRKKEPPRASPPGGLAEPPGSAGPQAGPTVVPGSATPMETGIAETPEGRRTSRRKRAKVEYREMDESLANLSEDEYYSEEERNAKAEKEKKLPPPPPQAPPEEENESEPEEPSGVEGAAFQSRLPHDRMTSQEAACFPDIISGPQQTQKVFLFIRNRTLQLWLDNPKIQLTFEATLQQLEAPYNSDTVLVHRVHSYLERHGLINFGIYKRIKPLPTKKTGKVIIIGSGVSGLAAARQLQSFGMDVTLLEARDRVGGRVATFRKGNYVADLGAMVVTGLGGNPMAVVSKQVNMELAKIKQKCPLYEANGQAVPKEKDEMVEQEFNRLLEATSYLSHQLDFNVLNNKPVSLGQALEVVIQLQEKHVKDEQIEHWKKIVKTQEELKELLNKMVNLKEKIKELHQQYKEASEVKPPRDITAEFLVKSKHRDLTALCKEYDELAETQGKLEEKLQELEANPPSDVYLSSRDRQILDWHFANLEFANATPLSTLSLKHWDQDDDFEFTGSHLTVRNGYSCVPVALAEGLDIKLNTAVRQVRYTASGCEVIAVNTRSTSQTFIYKCDAVLCTLPLGVLKQQPPAVQFVPPLPEWKTSAVQRMGFGNLNKVVLCFDRVFWDPSVNLFGHVGSTTASRGELFLFWNLYKAPILLALVAGEAAGIMENISDDVIVGRCLAILKGIFGSSAVPQPKETVVSRWRADPWARGSYSYVAAGSSGNDYDLMAQPITPGPSIPGAPQPIPRLFFAGEHTIRNYPATVHGALLSGLREAGRIADQFLGAMYTLPRQATPGVPAQQSPSM

SEQ ID NO: 607 - protein, 384 aa, Synthetic construct
  REGION 1..384: note = DNMT3L
MAAIPALDPEAEPSMDVILVGSSELSSSVSPGTGRDLIAYEVKANQRNIEDICICCGSLQVHTQHPLFEGGICAPCKDKFLDALFLYDDDGYQSYCSICSGETLLICGNPDCTRCYCFECVDSLVGPGTSGKVHAMSNWVCYLCLPSSSGLLQRRRKWRSQLKAFYDRESENPLEMFETVPVWRRQPVRVLSLFEDIKKELTSLGFLESGSDPGQLKHVVDVTDTVRKDVEEWGPFDLVYGATPPLGHTCDRPPSWYLFQFHRLLQYARPKPGSPRPFFWMFVDNLVLNKEDLDVASRFLEMEPVTIPDVHGGSLQNAVRVWSNIPAIRSRHWALVSEEELSLLAQNKQSSKLAAKWPTKLVKNCFLPLREYFKYFSTELTSSL

SEQ ID NO: 608 - protein, 746 aa, Synthetic construct
  REGION 1..746: note = EZH2 (AA)
MGQTGKKSEKGPVCWRKRVKSEYMRLRQLKRFRRADEVKTMFSSNRQKILERTETLNQEWKQRRIQPVHIMTSVSSLRGTRECSVTSDLDFPAQVIPLKTLNAVASVPIMYSWSPLQQNFMVEDETVLHNIPYMGDEVLDQDGTFIEELIKNYDGKVHGDRECGFINDEIFVELVNALGQYNDDDDDDDGDDPDEREEKQKDLEDNRDDKETCPPRKFPADKIFEAISSMFPDKGTAEELKEKYKELTEQQLPGALPPECTPNIDGPNAKSVQREQSLHSFHTLFCRRCFKYDCFLHPFHATPNTYKRKNTETALDNKPCGPQCYQHLEGAKEFAAALTAERIKTPPKRPGGRRRGRLPNNSSRPSTPTISVLESKDTDSDREAGTETGGENNDKEEEEKKDETSSSSEANSRCQTPIKMKPNIEPPENVEWSGAEASMFRVLIGTYYDNFCAIARLIGTKTCRQVYEFRVKESSIIAPVPTEDVDTPPRKKKRKHRLWAAHCRKIQLKKDGSSNHVYNYQPCDHPRQPCDSSCPCVIAQNFCEKFCQCSSECQNRFPGCRCKAQCNTKQCPCYLAVRECDPDLCLTCGAADHWDSKNVSCKNCSIQRGSKKHLLLAPSDVAGWGIFIKDPVQKNEFISEYCGEIISQDEADRRGKVYDKYMCSFLFNLNNDFVVDATRKGNKIRFANHSVNPNCYAKVMMVNGDHRIGIFAKRAIQTGEELFFDYRYSQADALKYVGIEREMEIP

SEQ ID NO: 609 - protein, 5 aa, Synthetic construct
  REGION 1..5: note = GGGGS linker (AA)
GGGGS

SEQ ID NO: 610 - protein, 5 aa, Synthetic construct
  REGION 1..5: note = GGGGG linker (AA)
GGGGG

SEQ ID NO: 611 - protein, 5 aa, Synthetic construct
  REGION 1..5: note = GGAGG linker (AA)
GGAGG

SEQ ID NO: 612 - protein, 7 aa, Synthetic construct
  REGION 1..7: note = GGGGSSS linker (AA)
GGGGSSS

SEQ ID NO: 613 - protein, 7 aa, Synthetic construct
  REGION 1..7: note = GGGGAAA linker (AA)
GGGGAAA

SEQ ID NO: 614 - protein, 7 aa, Synthetic construct
  REGION 1..7: note = NLS - SV40 (AA)
PKKKRKV

SEQ ID NO: 615 - protein, 9 aa, Synthetic construct
  REGION 1..9: note = NLS - cMyc (AA)
PAAKRVKLD

SEQ ID NO: 616 - protein, 11 aa, Synthetic construct
  REGION 1..11: note = NLS - cMyc (AA)
RQRRNELKRSP

SEQ ID NO: 617 - protein, 38 aa, Synthetic construct
  REGION 1..38: note = NLS - hRNPA1 M9 (AA)
NQSSNFGPMKGGNFGGRSSGPYGGGGQYFAKPRNQGGY

SEQ ID NO: 618 - protein, 42 aa, Synthetic construct
  REGION 1..42: note = NLS - IBB domain importin-alpha (AA)
RMRIZFKNKGKDTAELRRRRVEVSVELRKAKKDEQILKRRNV

SEQ ID NO: 619 - protein, 8 aa, Synthetic construct
  REGION 1..8: note = NLS - myoma T protein (AA)
VSRKRPRP

SEQ ID NO: 620 - protein, 8 aa, Synthetic construct
  REGION 1..8: note = NLS - myoma T protein (AA)
PPKKARED

SEQ ID NO: 621 - protein, 8 aa, Homo sapiens
  REGION 1..8: note = NLS - human p53 (AA)
PQPKKKPL

SEQ ID NO: 622 - protein, 12 aa, Mus musculus
  REGION 1..12: note = NLS - mouse c-abl IV (AA)
SALIKKKKKMAP

SEQ ID NO: 623 - protein, 5 aa, Synthetic construct
  REGION 1..5: note = NLS - influenza NS1 (AA)
DRLRR

SEQ ID NO: 624 - protein, 7 aa, Synthetic construct
  REGION 1..7: note = NLS - influenza NS1 (AA)
PKQKKRK

SEQ ID NO: 625 - protein, 10 aa, Synthetic construct
  REGION 1..10: note = NLS - hepatitis delta antigen (AA)
RKLKKKIKKL

SEQ ID NO: 626 - protein, 10 aa, Mus musculus
  REGION 1..10: note = NLS - mouse Mx1 (AA)
REKKKFLKRR

SEQ ID NO: 627 - protein, 20 aa, Homo sapiens
  REGION 1..20: note = NLS - human poly(ADP-ribose) polymerase (AA)
KRKGDEVDGVDEVAKKKSKK

SEQ ID NO: 628 - protein, 17 aa, Synthetic construct
  REGION 1..17: note = NLS - glucocorticoid (AA)
RKCLQAGMNLEARKTKK

SEQ ID NO: 629 - skipped

SEQ ID NO: 630 - protein, 6 aa, Synthetic construct
  REGION 1..6: note = PAM - SaCas9
NNGRRT

SEQ ID NO: 631 - protein, 8 aa, Neisseria meningitidis
  REGION 1..8: note = PAM - N. meningitidis Cas9
NNNNGATT

SEQ ID NO: 632 - protein, 8 aa, Campylobacter jejuni
  REGION 1..8: note = PAM - C. jejuni Cas9
NNNNRYAC

SEQ ID NO: 633 - protein, 7 aa, Synthetic construct
  REGION 1..7: note = PAM - S. thermophilus
NNAGAAW

SEQ ID NO: 634 - skipped

SEQ ID NO: 635 - protein, 6 aa, Treponema denticola
  REGION 1..6: note = PAM - T. denticola
NAAAAC

SEQ ID NO: 636 - protein, 4 aa, Synthetic construct
  REGION 1..4: note = PAM - Cas12a/Cpf1
TTTV

SEQ ID NO: 637 - protein, 4 aa, Synthetic construct
  REGION 1..4: note = Variant PAM - SpCas9 variant
NGAN

SEQ ID NO: 638 - protein, 4 aa, Synthetic construct
  REGION 1..4: note = Variant PAM - SpCas9 variant
NGNG

SEQ ID NO: 639 - protein, 4 aa, Synthetic construct
  REGION 1..4: note = Variant PAM - SpCas9 variant
NGAG

SEQ ID NO: 640 - protein, 4 aa, Synthetic construct
  REGION 1..4: note = Variant PAM - SpCas9 variant
NGCG

SEQ ID NO: 641 - protein, 22 aa, Synthetic construct
  REGION 1..22: note = SunTag GCN4 peptide (AA)
LLPKNYHLENEVARLKKLVGER

SEQ ID NO: 642 - protein, 5 aa, Synthetic construct
  REGION 1..5: note = Linker (AA)
GGSGG

SEQ ID NO: 643 - protein, 80 aa, Synthetic construct
  REGION 1..80: note = XTEN80 (aa)
GGPSSGAPPPSGGSPAGSPTSTEEGTSESATPESGPGTSTEPSEGSAPGSPAGSPTSTEEGTSTEPSEGSAPGTSTEPSE

SEQ ID NO: 644 - DNA, 6276 bp, Synthetic construct
  misc_feature 1..6276: note = DNMT3A/L-dCas9-KRAB (nt)
  source 1..6276: mol_type = other DNA
atggactacaaagaccatgacggtgattataaagatcatgacatcgattacaaggatgacgatgacaagcacgttaaccacgatcaggagtttgacccccctaaggtgtacccacccgtgccagccgagaagaggaagcccatccgcgtgctgtccctgttcgacggcatcgccacaggcctgctggtgctgaaggatctgggcatccaggtggacagatatatcgcctccgaggtgtgcgaggattctatcaccgtgggcatggtgaggcaccagggcaagatcatgtacgtgggcgacgtgcgcagcgtgacacagaagcacatccaggagtggggacccttcgacctggtcatcggaggcagcccctgtaatgacctgtccatcgtgaaccctgcaaggaagggcctgtatgagggaaccggcagactgttctttgagttctacaggctgctgcacgacgcccgccctaaggagggcgatgacaggccattcttttggctgtttgagaacgtggtggccatgggcgtgagcgacaagcgggatatctccagattcctggagtctaatcccgtgatgatcgatgcaaaggaggtgtctgccgcacacagggcaaggtacttttggggaaatctgcctggcatgaaccgcccactggccagcaccgtgaacgacaagctggagctgcaggagtgcctggagcacggaaggatcgccaagttctccaaggtgcggacaatcaccacaagatctaacagcatcaagcagggcaaggatcagcacttccccgtgttcatgaatgagaaggaggacatcctgtggtgtaccgagatggagcgcgtgttcggctttccagtgcactatacagacgtgagcaatatgagccggctggcaaggcagagactgctgggccggtcctggtctgtgccagtgatcagacacctgttcgcccccctgaaggagtactttgcctgcgtgtctagcggcaactctaatgccaacagcagaggcccttccttttcctctggcctggtgccactgtctctgaggggcagccacatgggccccatggagatctacaagaccgtgtccgcctggaagaggcagcctgtgcgcgtgctgtctctgttccgcaacatcgacaaggtgctgaagagcctgggctttctggagagcggatccggatctggaggaggcaccctgaagtatgtggaggatgtgacaaatgtggtgcggagagatgtggagaagtggggccccttcgatctggtgtacggatccacccagccactgggaagctcctgcgataggtgtccaggatggtatatgttccagtttcacagaatcctgcagtacgcactgccaaggcaggagagccagcgccctttcttttggatctttatggacaacctgctgctgacagaggatgaccaggagacaacaacccgcttcctgcagacagaggcagtgaccctgcaggatgtgaggggacgcgactatcagaatgccatgcgggtgtggtctaacatccctggcctgaagagcaagcacgcccccctgacccctaaggaggaggagtacctgcaggcccaggtgcggagcagatccaagctggatgcccctaaggtggacctgctggtgaagaattgtctgctgccactgcgggagtacttcaagtactttagtcagaatagcctgccactggaggcaagcggatccggaagggcatctcctggaatcccaggaagcacccgcaaccccaagaagaagcggaaggtgggcatccacggcgtgcccgccgccgacaagaagtacagcatcggcctggccatcggcaccaacagcgtgggctgggccgtgatcaccgacgagtacaaggtgcccagcaagaagttcaaggtgctgggcaacaccgaccggcacagcatcaagaagaacctgatcggcgccctgctgttcgacagcggcgagaccgccgaggccacccggctgaagcggaccgcccggcggcggtacacccggcggaagaaccggatctgctacctgcaggagatcttcagcaacgagatggccaaggtggacgacagcttcttccaccggctggaggagagcttcctggtggaggaggacaagaagcacgagcggcaccccatcttcggcaacatcgtggacgaggtggcctaccacgagaagtaccccaccatctaccacctgcggaagaagctggtggacagcaccgacaaggccgacctgcggctgatctacctggccctggcccacatgatcaagttccggggccacttcctgatcgagggcgacctgaaccccgacaacagcgacgtggacaagctgttcatccagctggtgcagacctacaaccagctgttcgaggagaaccccatcaacgccagcggcgtggacgccaaggccatcctgagcgcccggctgagcaagagccggcggctggagaacctgatcgcccagctgcccggcgagaagaagaacggcctgttcggcaacctgatcgccctgagcctgggcctgacccccaacttcaagagcaacttcgacctggccgaggacgccaagctgcagctgagcaaggacacctacgacgacgacctggacaacctgctggcccagatcggcgaccagtacgccgacctgttcctggccgccaagaacctgagcgacgccatcctgctgagcgacatcctgcgggtgaacaccgagatcaccaaggcccccctgagcgccagcatgatcaagcggtacgacgagcaccaccaggacctgaccctgctgaaggccctggtgcggcagcagctgcccgagaagtacaaggagatcttcttcgaccagagcaagaacggctacgccggctacatcgacggcggcgccagccaggaggagttctacaagttcatcaagcccatcctggagaagatggacggcaccgaggagctgctggtgaagctgaaccgggaggacctgctgcggaagcagcggaccttcgacaacggcagcatcccccaccagatccacctgggcgagctgcacgccatcctgcggcggcaggaggacttctaccccttcctgaaggacaaccgggagaagatcgagaagatcctgaccttccggatcccctactacgtgggccccctggcccggggcaacagccggttcgcctggatgacccggaagagcgaggagaccatcaccccctggaacttcgaggaggtggtggacaagggcgccagcgcccagagcttcatcgagcggatgaccaacttcgacaagaacctgcccaacgagaaggtgctgcccaagcacagcctgctgtacgagtacttcaccgtgtacaacgagctgaccaaggtgaagtacgtgaccgagggcatgcggaagcccgccttcctgagcggcgagcagaagaaggccatcgtggacctgctgttcaagaccaaccggaaggtgaccgtgaagcagctgaaggaggactacttcaagaagatcgagtgcttcgacagcgtggagatcagcggcgtggaggaccggttcaacgccagcctgggcacctaccacgacctgctgaagatcatcaaggacaaggacttcctggacaacgaggagaacgaggacatcctggaggacatcgtgctgaccctgaccctgttcgaggaccgggagatgatcgaggagcggctgaagacctacgcccacctgttcgacgacaaggtgatgaagcagctgaagcggcggcggtacaccggctggggccggctgagccggaagctgatcaacggcatccgggacaagcagagcggcaagaccatcctggacttcctgaagagcgacggcttcgccaaccggaacttcatgcagctgatccacgacgacagcctgaccttcaaggaggacatccagaaggcccaggtgagcggccagggcgacagcctgcacgagcacatcgccaacctggccggcagccccgccatcaagaagggcatcctgcagaccgtgaaggtggtggacgagctggtgaaggtgatgggccggcacaagcccgagaacatcgtgatcgagatggcccgggagaaccagaccacccagaagggccagaagaacagccgggagcggatgaagcggatcgaggagggcatcaaggagctgggcagccagatcctgaaggagcaccccgtggagaacacccagctgcagaacgagaagctgtacctgtactacctgcagaacggccgggacatgtacgtggaccaggagctggacatcaaccggctgagcgactacgacgtggacgccatcgtgccccagagcttcctgaaggacgacagcatcgacaacaaggtgctgacccggagcgacaagaaccggggcaagagcgacaacgtgcccagcgaggaggtggtgaagaagatgaagaactactggcggcagctgctgaacgccaagctgatcacccagcggaagttcgacaacctgaccaaggccgagcggggcggcctgagcgagctggacaaggccggcttcatcaagcggcagctggtggagacccggcagatcaccaagcacgtggcccagatcctggacagccggatgaacaccaagtacgacgagaacgacaagctgatccgggaggtgaaggtgatcaccctgaagagcaagctggtgagcgacttccggaaggacttccagttctacaaggtgcgggagatcaacaactaccaccacgcccacgacgcctacctgaacgccgtggtgggcaccgccctgatcaagaagtaccccaagctggagagcgagttcgtgtacggcgactacaaggtgtacgacgtgcggaagatgatcgccaagagcgagcaggagatcggcaaggccaccgccaagtacttcttctacagcaacatcatgaacttcttcaagaccgagatcaccctggccaacggcgagatccggaagcggcccctgatcgagaccaacggcgagaccggcgagatcgtgtgggacaagggccgggacttcgccaccgtgcggaaggtgctgagcatgccccaggtgaacatcgtgaagaagaccgaggtgcagaccggcggcttcagcaaggagagcatcctgcccaagcggaacagcgacaagctgatcgcccggaagaaggactgggaccccaagaagtacggcggcttcgacagccccaccgtggcctacagcgtgctggtggtggccaaggtggagaagggcaagagcaagaagctgaagagcgtgaaggagctgctgggcatcaccatcatggagcggagcagcttcgagaagaaccccatcgacttcctggaggccaagggctacaaggaggtgaagaaggacctgatcatcaagctgcccaagtacagcctgttcgagctggagaacggccggaagcggatgctggccagcgccggcgagctgcagaagggcaacgagctggccctgcccagcaagtacgtgaacttcctgtacctggccagccactacgagaagctgaagggcagccccgaggacaacgagcagaagcagctgttcgtggagcagcacaagcactacctggacgagatcatcgagcagatcagcgagttcagcaagcgggtgatcctggccgacgccaacctggacaaggtgctgagcgcctacaacaagcaccgggacaagcccatccgggagcaggccgagaacatcatccacctgttcaccctgaccaacctgggcgcccccgccgccttcaagtacttcgacaccaccatcgaccggaagcggtacaccagcaccaaggaggtgctggacgccaccctgatccaccagagcatcaccggcctgtacgagacccggatcgacctgagccagctgggcggcgacagcggcggcaagcggcccgccgccaccaagaaggccggccaggccaagaagaagaaggctagcgatgctaagtcactgactgcctggtcccggacactggtgaccttcaaggatgtgtttgtggacttcaccagggaggagtggaagctgctggacactgctcagcagatcctgtacagaaatgtgatgctggagaactataagaacctggtttccttgggttatcagcttactaagccagatgtgatcctccggttggagaagggagaagagccctggctggtggagagagaaattcaccaagagacccatcctgattcagagactgcatttgaaatcaaatcatcagttccgaaaaagaaacgcaaagtt

SEQ ID NO: 645 - protein, 2092 aa, Synthetic construct
  REGION 1..2092: note = DNMT3A/L-dSpCas9-KRAB(AA)
MDYKDHDGDYKDHDIDYKDDDDKHVNHDQEFDPPKVYPPVPAEKRKPIRVLSLFDGIATGLLVLKDLGIQVDRYIASEVCEDSITVGMVRHQGKIMYVGDVRSVTQKHIQEWGPFDLVIGGSPCNDLSIVNPARKGLYEGTGRLFFEFYRLLHDARPKEGDDRPFFWLFENVVAMGVSDKRDISRFLESNPVMIDAKEVSAAHRARYFWGNLPGMNRPLASTVNDKLELQECLEHGRIAKFSKVRTITTRSNSIKQGKDQHFPVFMNEKEDILWCTEMERVFGFPVHYTDVSNMSRLARQRLLGRSWSVPVIRHLFAPLKEYFACVSSGNSNANSRGPSFSSGLVPLSLRGSHMGPMEIYKTVSAWKRQPVRVLSLFRNIDKVLKSLGFLESGSGSGGGTLKYVEDVTNVVRRDVEKWGPFDLVYGSTQPLGSSCDRCPGWYMFQFHRILQYALPRQESQRPFFWIFMDNLLLTEDDQETTTRFLQTEAVTLQDVRGRDYQNAMRVWSNIPGLKSKHAPLTPKEEEYLQAQVRSRSKLDAPKVDLLVKNCLLPLREYFKYFSQNSLPLEASGSGRASPGIPGSTRNPKKKRKVGIHGVPAADKKYSIGLAIGTNSVGWAVITDEYKVPSKKFKVLGNTDRHSIKKNLIGALLFDSGETAEATRLKRTARRRYTRRKNRICYLQEIFSNEMAKVDDSFFHRLEESFLVEEDKKHERHPIFGNIVDEVAYHEKYPTIYHLRKKLVDSTDKADLRLIYLALAHMIKFRGHFLIEGDLNPDNSDVDKLFIQLVQTYNQLFEENPINASGVDAKAILSARLSKSRRLENLIAQLPGEKKNGLFGNLIALSLGLTPNFKSNFDLAEDAKLQLSKDTYDDDLDNLLAQIGDQYADLFLAAKNLSDAILLSDILRVNTEITKAPLSASMIKRYDEHHQDLTLLKALVRQQLPEKYKEIFFDQSKNGYAGYIDGGASQEEFYKFIKPILEKMDGTEELLVKLNREDLLRKQRTFDNGSIPHQIHLGELHAILRRQEDFYPFLKDNREKIEKILTFRIPYYVGPLARGNSRFAWMTRKSEETITPWNFEEVVDKGASAQSFIERMTNFDKNLPNEKVLPKHSLLYEYFTVYNELTKVKYVTEGMRKPAFLSGEQKKAIVDLLFKTNRKVTVKQLKEDYFKKIECFDSVEISGVEDRFNASLGTYHDLLKIIKDKDFLDNEENEDILEDIVLTLTLFEDREMIEERLKTYAHLFDDKVMKQLKRRRYTGWGRLSRKLINGIRDKQSGKTILDFLKSDGFANRNFMQLIHDDSLTFKEDIQKAQVSGQGDSLHEHIANLAGSPAIKKGILQTVKVVDELVKVMGRHKPENIVIEMARENQTTQKGQKNSRERMKRIEEGIKELGSQILKEHPVENTQLQNEKLYLYYLQNGRDMYVDQELDINRLSDYDVDAIVPQSFLKDDSIDNKVLTRSDKNRGKSDNVPSEEVVKKMKNYWRQLLNAKLITQRKFDNLTKAERGGLSELDKAGFIKRQLVETRQITKHVAQILDSRMNTKYDENDKLIREVKVITLKSKLVSDFRKDFQFYKVREINNYHHAHDAYLNAVVGTALIKKYPKLESEFVYGDYKVYDVRKMIAKSEQEIGKATAKYFFYSNIMNFFKTEITLANGEIRKRPLIETNGETGEIVWDKGRDFATVRKVLSMPQVNIVKKTEVQTGGFSKESILPKRNSDKLIARKKDWDPKKYGGFDSPTVAYSVLVVAKVEKGKSKKLKSVKELLGITIMERSSFEKNPIDFLEAKGYKEVKKDLIIKLPKYSLFELENGRKRMLASAGELQKGNELALPSKYVNFLYLASHYEKLKGSPEDNEQKQLFVEQHKHYLDEIIEQISEFSKRVILADANLDKVLSAYNKHRDKPIREQAENIIHLFTLTNLGAPAAFKYFDTTIDRKRYTSTKEVLDATLIHQSITGLYETRIDLSQLGGDSGGKRPAATKKAGQAKKKKASDAKSLTAWSRTLVTFKDVFVDFTREEWKLLDTAQQILYRNVMLENYKNLVSLGYQLTKPDVILRLEKGEEPWLVEREIHQETHPDSETAFEIKSSVPKKKRKV

SEQ ID NO: 646 - DNA, 6399 bp, Synthetic construct
  misc_feature 1..6399: note = DNMT3A/L-XTEN80-dSpCas9-KRAB (nt)
  source 1..6399: mol_type = other DNA
atgaaccacgatcaggagtttgacccccctaaggtgtacccacccgtgccagccgagaagaggaagcccatccgcgtgctgtccctgttcgacggcatcgccacaggcctgctggtgctgaaggatctgggcatccaggtggacagatatatcgcctccgaggtgtgcgaggattctatcaccgtgggcatggtgaggcaccagggcaagatcatgtacgtgggcgacgtgcgcagcgtgacacagaagcacatccaggagtggggacccttcgacctggtcatcggaggcagcccctgtaatgacctgtccatcgtgaaccctgcaaggaagggcctgtatgagggaaccggcagactgttctttgagttctacaggctgctgcacgacgcccgccctaaggagggcgatgacaggccattcttttggctgtttgagaacgtggtggccatgggcgtgagcgacaagcgggatatctccagattcctggagtctaatcccgtgatgatcgatgcaaaggaggtgtctgccgcacacagggcaaggtacttttggggaaatctgcctggcatgaaccgcccactggccagcaccgtgaacgacaagctggagctgcaggagtgcctggagcacggaaggatcgccaagttctccaaggtgcggacaatcaccacaagatctaacagcatcaagcagggcaaggatcagcacttccccgtgttcatgaatgagaaggaggacatcctgtggtgtaccgagatggagcgcgtgttcggctttccagtgcactatacagacgtgagcaatatgagccggctggcaaggcagagactgctgggccggtcctggtctgtgccagtgatcagacacctgttcgcccccctgaaggagtactttgcctgcgtgtctagcggcaactctaatgccaacagcagaggcccttccttttcctctggcctggtgccactgtctctgaggggcagccacatgggccccatggagatctacaagaccgtgtccgcctggaagaggcagcctgtgcgcgtgctgtctctgttccgcaacatcgacaaggtgctgaagagcctgggctttctggagagcggatccggatctggaggaggcaccctgaagtatgtggaggatgtgacaaatgtggtgcggagagatgtggagaagtggggccccttcgatctggtgtacggatccacccagccactgggaagctcctgcgataggtgtccaggatggtatatgttccagtttcacagaatcctgcagtacgcactgccaaggcaggagagccagcgccctttcttttggatctttatggacaacctgctgctgacagaggatgaccaggagacaacaacccgcttcctgcagacagaggcagtgaccctgcaggatgtgaggggacgcgactatcagaatgccatgcgggtgtggtctaacatccctggcctgaagagcaagcacgcccccctgacccctaaggaggaggagtacctgcaggcccaggtgcggagcagatccaagctggatgcccctaaggtggacctgctggtgaagaattgtctgctgccactgcgggagtacttcaagtactttagtcagaatagcctgccactgggagggccgagctctggcgcacccccaccaagtggagggtctcctgccgggtccccaacatctactgaagaaggcaccagcgaatccgcaacgcccgagtcaggccctggtacctccacagaaccatctgaaggtagtgcgcctggttccccagctggaagccctacttccaccgaagaaggcacgtcaaccgaaccaagtgaaggatctgcccctgggaccagcactgaaccatctgaggttaaccccaagaagaagcggaaggtgggcatccacggcgtgcccgccgccgacaagaagtacagcatcggcctggccatcggcaccaacagcgtgggctgggccgtgatcaccgacgagtacaaggtgcccagcaagaagttcaaggtgctgggcaacaccgaccggcacagcatcaagaagaacctgatcggcgccctgctgttcgacagcggcgagaccgccgaggccacccggctgaagcggaccgcccggcggcggtacacccggcggaagaaccggatctgctacctgcaggagatcttcagcaacgagatggccaaggtggacgacagcttcttccaccggctggaggagagcttcctggtggaggaggacaagaagcacgagcggcaccccatcttcggcaacatcgtggacgaggtggcctaccacgagaagtaccccaccatctaccacctgcggaagaagctggtggacagcaccgacaaggccgacctgcggctgatctacctggccctggcccacatgatcaagttccggggccacttcctgatcgagggcgacctgaaccccgacaacagcgacgtggacaagctgttcatccagctggtgcagacctacaaccagctgttcgaggagaaccccatcaacgccagcggcgtggacgccaaggccatcctgagcgcccggctgagcaagagccggcggctggagaacctgatcgcccagctgcccggcgagaagaagaacggcctgttcggcaacctgatcgccctgagcctgggcctgacccccaacttcaagagcaacttcgacctggccgaggacgccaagctgcagctgagcaaggacacctacgacgacgacctggacaacctgctggcccagatcggcgaccagtacgccgacctgttcctggccgccaagaacctgagcgacgccatcctgctgagcgacatcctgcgggtgaacaccgagatcaccaaggcccccctgagcgccagcatgatcaagcggtacgacgagcaccaccaggacctgaccctgctgaaggccctggtgcggcagcagctgcccgagaagtacaaggagatcttcttcgaccagagcaagaacggctacgccggctacatcgacggcggcgccagccaggaggagttctacaagttcatcaagcccatcctggagaagatggacggcaccgaggagctgctggtgaagctgaaccgggaggacctgctgcggaagcagcggaccttcgacaacggcagcatcccccaccagatccacctgggcgagctgcacgccatcctgcggcggcaggaggacttctaccccttcctgaaggacaaccgggagaagatcgagaagatcctgaccttccggatcccctactacgtgggccccctggcccggggcaacagccggttcgcctggatgacccggaagagcgaggagaccatcaccccctggaacttcgaggaggtggtggacaagggcgccagcgcccagagcttcatcgagcggatgaccaacttcgacaagaacctgcccaacgagaaggtgctgcccaagcacagcctgctgtacgagtacttcaccgtgtacaacgagctgaccaaggtgaagtacgtgaccgagggcatgcggaagcccgccttcctgagcggcgagcagaagaaggccatcgtggacctgctgttcaagaccaaccggaaggtgaccgtgaagcagctgaaggaggactacttcaagaagatcgagtgcttcgacagcgtggagatcagcggcgtggaggaccggttcaacgccagcctgggcacctaccacgacctgctgaagatcatcaaggacaaggacttcctggacaacgaggagaacgaggacatcctggaggacatcgtgctgaccctgaccctgttcgaggaccgggagatgatcgaggagcggctgaagacctacgcccacctgttcgacgacaaggtgatgaagcagctgaagcggcggcggtacaccggctggggccggctgagccggaagctgatcaacggcatccgggacaagcagagcggcaagaccatcctggacttcctgaagagcgacggcttcgccaaccggaacttcatgcagctgatccacgacgacagcctgaccttcaaggaggacatccagaaggcccaggtgagcggccagggcgacagcctgcacgagcacatcgccaacctggccggcagccccgccatcaagaagggcatcctgcagaccgtgaaggtggtggacgagctggtgaaggtgatgggccggcacaagcccgagaacatcgtgatcgagatggcccgggagaaccagaccacccagaagggccagaagaacagccgggagcggatgaagcggatcgaggagggcatcaaggagctgggcagccagatcctgaaggagcaccccgtggagaacacccagctgcagaacgagaagctgtacctgtactacctgcagaacggccgggacatgtacgtggaccaggagctggacatcaaccggctgagcgactacgacgtggacgccatcgtgccccagagcttcctgaaggacgacagcatcgacaacaaggtgctgacccggagcgacaagaaccggggcaagagcgacaacgtgcccagcgaggaggtggtgaagaagatgaagaactactggcggcagctgctgaacgccaagctgatcacccagcggaagttcgacaacctgaccaaggccgagcggggcggcctgagcgagctggacaaggccggcttcatcaagcggcagctggtggagacccggcagatcaccaagcacgtggcccagatcctggacagccggatgaacaccaagtacgacgagaacgacaagctgatccgggaggtgaaggtgatcaccctgaagagcaagctggtgagcgacttccggaaggacttccagttctacaaggtgcgggagatcaacaactaccaccacgcccacgacgcctacctgaacgccgtggtgggcaccgccctgatcaagaagtaccccaagctggagagcgagttcgtgtacggcgactacaaggtgtacgacgtgcggaagatgatcgccaagagcgagcaggagatcggcaaggccaccgccaagtacttcttctacagcaacatcatgaacttcttcaagaccgagatcaccctggccaacggcgagatccggaagcggcccctgatcgagaccaacggcgagaccggcgagatcgtgtgggacaagggccgggacttcgccaccgtgcggaaggtgctgagcatgccccaggtgaacatcgtgaagaagaccgaggtgcagaccggcggcttcagcaaggagagcatcctgcccaagcggaacagcgacaagctgatcgcccggaagaaggactgggaccccaagaagtacggcggcttcgacagccccaccgtggcctacagcgtgctggtggtggccaaggtggagaagggcaagagcaagaagctgaagagcgtgaaggagctgctgggcatcaccatcatggagcggagcagcttcgagaagaaccccatcgacttcctggaggccaagggctacaaggaggtgaagaaggacctgatcatcaagctgcccaagtacagcctgttcgagctggagaacggccggaagcggatgctggccagcgccggcgagctgcagaagggcaacgagctggccctgcccagcaagtacgtgaacttcctgtacctggccagccactacgagaagctgaagggcagccccgaggacaacgagcagaagcagctgttcgtggagcagcacaagcactacctggacgagatcatcgagcagatcagcgagttcagcaagcgggtgatcctggccgacgccaacctggacaaggtgctgagcgcctacaacaagcaccgggacaagcccatccgggagcaggccgagaacatcatccacctgttcaccctgaccaacctgggcgcccccgccgccttcaagtacttcgacaccaccatcgaccggaagcggtacaccagcaccaaggaggtgctggacgccaccctgatccaccagagcatcaccggcctgtacgagacccggatcgacctgagccagctgggcggcgacagcggcggcaagcggcccgccgccaccaagaaggccggccaggccaagaagaagaaggctagcgatgctaagtcactgactgcctggtcccggacactggtgaccttcaaggatgtgtttgtggacttcaccagggaggagtggaagctgctggacactgctcagcagatcctgtacagaaatgtgatgctggagaactataagaacctggtttccttgggttatcagcttactaagccagatgtgatcctccggttggagaagggagaagagccctggctggtggagagagaaattcaccaagagacccatcctgattcagagactgcatttgaaatcaaatcatcagttccgaaaaagaaacgcaaagtttag

SEQ ID NO: 647 - protein, 2132 aa, Synthetic construct
  REGION 1..2132: note = DNMT3A/L-XTEN80-dSpCas9-KRAB (AA)
MNHDQEFDPPKVYPPVPAEKRKPIRVLSLFDGIATGLLVLKDLGIQVDRYIASEVCEDSITVGMVRHQGKIMYVGDVRSVTQKHIQEWGPFDLVIGGSPCNDLSIVNPARKGLYEGTGRLFFEFYRLLHDARPKEGDDRPFFWLFENVVAMGVSDKRDISRFLESNPVMIDAKEVSAAHRARYFWGNLPGMNRPLASTVNDKLELQECLEHGRIAKFSKVRTITTRSNSIKQGKDQHFPVFMNEKEDILWCTEMERVFGFPVHYTDVSNMSRLARQRLLGRSWSVPVIRHLFAPLKEYFACVSSGNSNANSRGPSFSSGLVPLSLRGSHMGPMEIYKTVSAWKRQPVRVLSLFRNIDKVLKSLGFLESGSGSGGGTLKYVEDVTNVVRRDVEKWGPFDLVYGSTQPLGSSCDRCPGWYMFQFHRILQYALPRQESQRPFFWIFMDNLLLTEDDQETTTRFLQTEAVTLQDVRGRDYQNAMRVWSNIPGLKSKHAPLTPKEEEYLQAQVRSRSKLDAPKVDLLVKNCLLPLREYFKYFSQNSLPLGGPSSGAPPPSGGSPAGSPTSTEEGTSESATPESGPGTSTEPSEGSAPGSPAGSPTSTEEGTSTEPSEGSAPGTSTEPSEVNPKKKRKVGIHGVPAADKKYSIGLAIGTNSVGWAVITDEYKVPSKKFKVLGNTDRHSIKKNLIGALLFDSGETAEATRLKRTARRRYTRRKNRICYLQEIFSNEMAKVDDSFFHRLEESFLVEEDKKHERHPIFGNIVDEVAYHEKYPTIYHLRKKLVDSTDKADLRLIYLALAHMIKFRGHFLIEGDLNPDNSDVDKLFIQLVQTYNQLFEENPINASGVDAKAILSARLSKSRRLENLIAQLPGEKKNGLFGNLIALSLGLTPNFKSNFDLAEDAKLQLSKDTYDDDLDNLLAQIGDQYADLFLAAKNLSDAILLSDILRVNTEITKAPLSASMIKRYDEHHQDLTLLKALVRQQLPEKYKEIFFDQSKNGYAGYIDGGASQEEFYKFIKPILEKMDGTEELLVKLNREDLLRKQRTFDNGSIPHQIHLGELHAILRRQEDFYPFLKDNREKIEKILTFRIPYYVGPLARGNSRFAWMTRKSEETITPWNFEEVVDKGASAQSFIERMTNFDKNLPNEKVLPKHSLLYEYFTVYNELTKVKYVTEGMRKPAFLSGEQKKAIVDLLFKTNRKVTVKQLKEDYFKKIECFDSVEISGVEDRFNASLGTYHDLLKIIKDKDFLDNEENEDILEDIVLTLTLFEDREMIEERLKTYAHLFDDKVMKQLKRRRYTGWGRLSRKLINGIRDKQSGKTILDFLKSDGFANRNFMQLIHDDSLTFKEDIQKAQVSGQGDSLHEHIANLAGSPAIKKGILQTVKVVDELVKVMGRHKPENIVIEMARENQTTQKGQKNSRERMKRIEEGIKELGSQILKEHPVENTQLQNEKLYLYYLQNGRDMYVDQELDINRLSDYDVDAIVPQSFLKDDSIDNKVLTRSDKNRGKSDNVPSEEVVKKMKNYWRQLLNAKLITQRKFDNLTKAERGGLSELDKAGFIKRQLVETRQITKHVAQILDSRMNTKYDENDKLIREVKVITLKSKLVSDFRKDFQFYKVREINNYHHAHDAYLNAVVGTALIKKYPKLESEFVYGDYKVYDVRKMIAKSEQEIGKATAKYFFYSNIMNFFKTEITLANGEIRKRPLIETNGETGEIVWDKGRDFATVRKVLSMPQVNIVKKTEVQTGGFSKESILPKRNSDKLIARKKDWDPKKYGGFDSPTVAYSVLVVAKVEKGKSKKLKSVKELLGITIMERSSFEKNPIDFLEAKGYKEVKKDLIIKLPKYSLFELENGRKRMLASAGELQKGNELALPSKYVNFLYLASHYEKLKGSPEDNEQKQLFVEQHKHYLDEIIEQISEFSKRVILADANLDKVLSAYNKHRDKPIREQAENIIHLFTLTNLGAPAAFKYFDTTIDRKRYTSTKEVLDATLIHQSITGLYETRIDLSQLGGDSGGKRPAATKKAGQAKKKKASDAKSLTAWSRTLVTFKDVFVDFTREEWKLLDTAQQILYRNVMLENYKNLVSLGYQLTKPDVILRLEKGEEPWLVEREIHQETHPDSETAFEIKSSVPKKKRKV

SEQ ID NO: 648 - DNA, 6399 bp, Synthetic construct
  misc_feature 1..6399: note = DNMT3A/L(CRISPROFF)-XTEN80-dSpCas9-KRAB (nt)
  source 1..6399: mol_type = other DNA
agtaaccatgaccaggaatttgaccccccaaaggtttacccacctgtgccagctgagaagaggaagcccatccgcgtgctgtctctctttgatgggattgctacagggctcctggtgctgaaggacctgggcatccaagtggaccgctacattgcctccgaggtgtgtgaggactccatcacggtgggcatggtgcggcaccagggaaagatcatgtacgtcggggacgtccgcagcgtcacacagaagcatatccaggagtggggcccattcgacctggtgattggaggcagtccctgcaatgacctctccattgtcaaccctgcccgcaagggactttatgagggtactggccgcctcttctttgagttctaccgcctcctgcatgatgcgcggcccaaggagggagatgatcgccccttcttctggctctttgagaatgtggtggccatgggcgttagtgacaagagggacatctcgcgatttcttgagtctaaccccgtgatgattgacgccaaagaagtgtctgctgcacacagggcccgttacttctggggtaaccttcctggcatgaacaggcctttggcatccactgtgaatgataagctggagctgcaagagtgtctggagcacggcagaatagccaagttcagcaaagtgaggaccattaccaccaggtcaaactctataaagcagggcaaagaccagcatttccccgtcttcatgaacgagaaggaggacatcctgtggtgcactgaaatggaaagggtgtttggcttccccgtccactacacagacgtctccaacatgagccgcttggcgaggcagagactgctgggccgatcgtggagcgtgccggtcatccgccacctcttcgctccgctgaaggaatattttgcttgtgtgtctagcggcaatagtaacgctaacagccgcgggccgagcttcagcagcggcctggtgccgttaagcttgcgcggcagccatatgggccctatggagatatacaagacagtgtctgcatggaagagacagccagtgcgggtactgagcctcttcagaaacatcgacaaggtactaaagagtttgggcttcttggaaagcggttctggttctgggggaggaacgctgaagtacgtggaagatgtcacaaatgtcgtgaggagagacgtggagaaatggggcccctttgacctggtgtacggctcgacgcagcccctaggcagctcttgtgatcgctgtcccggctggtacatgttccagttccaccggatcctgcagtatgcgctgcctcgccaggagagtcagcggcccttcttctggatattcatggacaatctgctgctgactgaggatgaccaagagacaactacccgcttccttcagacagaggctgtgaccctccaggatgtccgtggcagagactaccagaatgctatgcgggtgtggagcaacattccagggctgaagagcaagcatgcgcccctgaccccaaaggaagaagagtatctgcaagcccaagtcagaagcaggagcaagctggacgccccgaaagttgacctcctggtgaagaactgccttctcccgctgagagagtacttcaagtatttttctcaaaactcacttcctcttggagggccgagctctggcgcacccccaccaagtggagggtctcctgccgggtccccaacatctactgaagaaggcaccagcgaatccgcaacgcccgagtcaggccctggtacctccacagaaccatctgaaggtagtgcgcctggttccccagctggaagccctacttccaccgaagaaggcacgtcaaccgaaccaagtgaaggatctgcccctgggaccagcactgaaccatctgaggttaaccccaagaagaagcggaaggtgggcatccacggcgtgcccgccgccgacaagaagtacagcatcggcctggccatcggcaccaacagcgtgggctgggccgtgatcaccgacgagtacaaggtgcccagcaagaagttcaaggtgctgggcaacaccgaccggcacagcatcaagaagaacctgatcggcgccctgctgttcgacagcggcgagaccgccgaggccacccggctgaagcggaccgcccggcggcggtacacccggcggaagaaccggatctgctacctgcaggagatcttcagcaacgagatggccaaggtggacgacagcttcttccaccggctggaggagagcttcctggtggaggaggacaagaagcacgagcggcaccccatcttcggcaacatcgtggacgaggtggcctaccacgagaagtaccccaccatctaccacctgcggaagaagctggtggacagcaccgacaaggccgacctgcggctgatctacctggccctggcccacatgatcaagttccggggccacttcctgatcgagggcgacctgaaccccgacaacagcgacgtggacaagctgttcatccagctggtgcagacctacaaccagctgttcgaggagaaccccatcaacgccagcggcgtggacgccaaggccatcctgagcgcccggctgagcaagagccggcggctggagaacctgatcgcccagctgcccggcgagaagaagaacggcctgttcggcaacctgatcgccctgagcctgggcctgacccccaacttcaagagcaacttcgacctggccgaggacgccaagctgcagctgagcaaggacacctacgacgacgacctggacaacctgctggcccagatcggcgaccagtacgccgacctgttcctggccgccaagaacctgagcgacgccatcctgctgagcgacatcctgcgggtgaacaccgagatcaccaaggcccccctgagcgccagcatgatcaagcggtacgacgagcaccaccaggacctgaccctgctgaaggccctggtgcggcagcagctgcccgagaagtacaaggagatcttcttcgaccagagcaagaacggctacgccggctacatcgacggcggcgccagccaggaggagttctacaagttcatcaagcccatcctggagaagatggacggcaccgaggagctgctggtgaagctgaaccgggaggacctgctgcggaagcagcggaccttcgacaacggcagcatcccccaccagatccacctgggcgagctgcacgccatcctgcggcggcaggaggacttctaccccttcctgaaggacaaccgggagaagatcgagaagatcctgaccttccggatcccctactacgtgggccccctggcccggggcaacagccggttcgcctggatgacccggaagagcgaggagaccatcaccccctggaacttcgaggaggtggtggacaagggcgccagcgcccagagcttcatcgagcggatgaccaacttcgacaagaacctgcccaacgagaaggtgctgcccaagcacagcctgctgtacgagtacttcaccgtgtacaacgagctgaccaaggtgaagtacgtgaccgagggcatgcggaagcccgccttcctgagcggcgagcagaagaaggccatcgtggacctgctgttcaagaccaaccggaaggtgaccgtgaagcagctgaaggaggactacttcaagaagatcgagtgcttcgacagcgtggagatcagcggcgtggaggaccggttcaacgccagcctgggcacctaccacgacctgctgaagatcatcaaggacaaggacttcctggacaacgaggagaacgaggacatcctggaggacatcgtgctgaccctgaccctgttcgaggaccgggagatgatcgaggagcggctgaagacctacgcccacctgttcgacgacaaggtgatgaagcagctgaagcggcggcggtacaccggctggggccggctgagccggaagctgatcaacggcatccgggacaagcagagcggcaagaccatcctggacttcctgaagagcgacggcttcgccaaccggaacttcatgcagctgatccacgacgacagcctgaccttcaaggaggacatccagaaggcccaggtgagcggccagggcgacagcctgcacgagcacatcgccaacctggccggcagccccgccatcaagaagggcatcctgcagaccgtgaaggtggtggacgagctggtgaaggtgatgggccggcacaagcccgagaacatcgtgatcgagatggcccgggagaaccagaccacccagaagggccagaagaacagccgggagcggatgaagcggatcgaggagggcatcaaggagctgggcagccagatcctgaaggagcaccccgtggagaacacccagctgcagaacgagaagctgtacctgtactacctgcagaacggccgggacatgtacgtggaccaggagctggacatcaaccggctgagcgactacgacgtggacgccatcgtgccccagagcttcctgaaggacgacagcatcgacaacaaggtgctgacccggagcgacaagaaccggggcaagagcgacaacgtgcccagcgaggaggtggtgaagaagatgaagaactactggcggcagctgctgaacgccaagctgatcacccagcggaagttcgacaacctgaccaaggccgagcggggcggcctgagcgagctggacaaggccggcttcatcaagcggcagctggtggagacccggcagatcaccaagcacgtggcccagatcctggacagccggatgaacaccaagtacgacgagaacgacaagctgatccgggaggtgaaggtgatcaccctgaagagcaagctggtgagcgacttccggaaggacttccagttctacaaggtgcgggagatcaacaactaccaccacgcccacgacgcctacctgaacgccgtggtgggcaccgccctgatcaagaagtaccccaagctggagagcgagttcgtgtacggcgactacaaggtgtacgacgtgcggaagatgatcgccaagagcgagcaggagatcggcaaggccaccgccaagtacttcttctacagcaacatcatgaacttcttcaagaccgagatcaccctggccaacggcgagatccggaagcggcccctgatcgagaccaacggcgagaccggcgagatcgtgtgggacaagggccgggacttcgccaccgtgcggaaggtgctgagcatgccccaggtgaacatcgtgaagaagaccgaggtgcagaccggcggcttcagcaaggagagcatcctgcccaagcggaacagcgacaagctgatcgcccggaagaaggactgggaccccaagaagtacggcggcttcgacagccccaccgtggcctacagcgtgctggtggtggccaaggtggagaagggcaagagcaagaagctgaagagcgtgaaggagctgctgggcatcaccatcatggagcggagcagcttcgagaagaaccccatcgacttcctggaggccaagggctacaaggaggtgaagaaggacctgatcatcaagctgcccaagtacagcctgttcgagctggagaacggccggaagcggatgctggccagcgccggcgagctgcagaagggcaacgagctggccctgcccagcaagtacgtgaacttcctgtacctggccagccactacgagaagctgaagggcagccccgaggacaacgagcagaagcagctgttcgtggagcagcacaagcactacctggacgagatcatcgagcagatcagcgagttcagcaagcgggtgatcctggccgacgccaacctggacaaggtgctgagcgcctacaacaagcaccgggacaagcccatccgggagcaggccgagaacatcatccacctgttcaccctgaccaacctgggcgcccccgccgccttcaagtacttcgacaccaccatcgaccggaagcggtacaccagcaccaaggaggtgctggacgccaccctgatccaccagagcatcaccggcctgtacgagacccggatcgacctgagccagctgggcggcgacagcggcggcaagcggcccgccgccaccaagaaggccggccaggccaagaagaagaaggctagcgatgctaagtcactgactgcctggtcccggacactggtgaccttcaaggatgtgtttgtggacttcaccagggaggagtggaagctgctggacactgctcagcagatcctgtacagaaatgtgatgctggagaactataagaacctggtttccttgggttatcagcttactaagccagatgtgatcctccggttggagaagggagaagagccctggctggtggagagagaaattcaccaagagacccatcctgattcagagactgcatttgaaatcaaatcatcagttccgaaaaagaaacgcaaagtttag

SEQ ID NO: 649 - protein, 2132 aa, Synthetic construct
  REGION 1..2132: note = DNMT3A/L(CRISPROFF)-XTEN80-dSpCas9-KRAB (AA)
SNHDQEFDPPKVYPPVPAEKRKPIRVLSLFDGIATGLLVLKDLGIQVDRYIASEVCEDSITVGMVRHQGKIMYVGDVRSVTQKHIQEWGPFDLVIGGSPCNDLSIVNPARKGLYEGTGRLFFEFYRLLHDARPKEGDDRPFFWLFENVVAMGVSDKRDISRFLESNPVMIDAKEVSAAHRARYFWGNLPGMNRPLASTVNDKLELQECLEHGRIAKFSKVRTITTRSNSIKQGKDQHFPVFMNEKEDILWCTEMERVFGFPVHYTDVSNMSRLARQRLLGRSWSVPVIRHLFAPLKEYFACVSSGNSNANSRGPSFSSGLVPLSLRGSHMGPMEIYKTVSAWKRQPVRVLSLFRNIDKVLKSLGFLESGSGSGGGTLKYVEDVTNVVRRDVEKWGPFDLVYGSTQPLGSSCDRCPGWYMFQFHRILQYALPRQESQRPFFWIFMDNLLLTEDDQETTTRFLQTEAVTLQDVRGRDYQNAMRVWSNIPGLKSKHAPLTPKEEEYLQAQVRSRSKLDAPKVDLLVKNCLLPLREYFKYFSQNSLPLGGPSSGAPPPSGGSPAGSPTSTEEGTSESATPESGPGTSTEPSEGSAPGSPAGSPTSTEEGTSTEPSEGSAPGTSTEPSEVNPKKKRKVGIHGVPAADKKYSIGLAIGTNSVGWAVITDEYKVPSKKFKVLGNTDRHSIKKNLIGALLFDSGETAEATRLKRTARRRYTRRKNRICYLQEIFSNEMAKVDDSFFHRLEESFLVEEDKKHERHPIFGNIVDEVAYHEKYPTIYHLRKKLVDSTDKADLRLIYLALAHMIKFRGHFLIEGDLNPDNSDVDKLFIQLVQTYNQLFEENPINASGVDAKAILSARLSKSRRLENLIAQLPGEKKNGLFGNLIALSLGLTPNFKSNFDLAEDAKLQLSKDTYDDDLDNLLAQIGDQYADLFLAAKNLSDAILLSDILRVNTEITKAPLSASMIKRYDEHHQDLTLLKALVRQQLPEKYKEIFFDQSKNGYAGYIDGGASQEEFYKFIKPILEKMDGTEELLVKLNREDLLRKQRTFDNGSIPHQIHLGELHAILRRQEDFYPFLKDNREKIEKILTFRIPYYVGPLARGNSRFAWMTRKSEETITPWNFEEVVDKGASAQSFIERMTNFDKNLPNEKVLPKHSLLYEYFTVYNELTKVKYVTEGMRKPAFLSGEQKKAIVDLLFKTNRKVTVKQLKEDYFKKIECFDSVEISGVEDRFNASLGTYHDLLKIIKDKDFLDNEENEDILEDIVLTLTLFEDREMIEERLKTYAHLFDDKVMKQLKRRRYTGWGRLSRKLINGIRDKQSGKTILDFLKSDGFANRNFMQLIHDDSLTFKEDIQKAQVSGQGDSLHEHIANLAGSPAIKKGILQTVKVVDELVKVMGRHKPENIVIEMARENQTTQKGQKNSRERMKRIEEGIKELGSQILKEHPVENTQLQNEKLYLYYLQNGRDMYVDQELDINRLSDYDVDAIVPQSFLKDDSIDNKVLTRSDKNRGKSDNVPSEEVVKKMKNYWRQLLNAKLITQRKFDNLTKAERGGLSELDKAGFIKRQLVETRQITKHVAQILDSRMNTKYDENDKLIREVKVITLKSKLVSDFRKDFQFYKVREINNYHHAHDAYLNAVVGTALIKKYPKLESEFVYGDYKVYDVRKMIAKSEQEIGKATAKYFFYSNIMNFFKTEITLANGEIRKRPLIETNGETGEIVWDKGRDFATVRKVLSMPQVNIVKKTEVQTGGFSKESILPKRNSDKLIARKKDWDPKKYGGFDSPTVAYSVLVVAKVEKGKSKKLKSVKELLGITIMERSSFEKNPIDFLEAKGYKEVKKDLIIKLPKYSLFELENGRKRMLASAGELQKGNELALPSKYVNFLYLASHYEKLKGSPEDNEQKQLFVEQHKHYLDEIIEQISEFSKRVILADANLDKVLSAYNKHRDKPIREQAENIIHLFTLTNLGAPAAFKYFDTTIDRKRYTSTKEVLDATLIHQSITGLYETRIDLSQLGGDSGGKRPAATKKAGQAKKKKASDAKSLTAWSRTLVTFKDVFVDFTREEWKLLDTAQQILYRNVMLENYKNLVSLGYQLTKPDVILRLEKGEEPWLVEREIHQETHPDSETAFEIKSSVPKKKRKV

SEQ ID NO: 650 - DNA, 3182 bp, Synthetic construct
  misc_feature 1..3182: note = Hepatitis B Virus genome (Hepatitis B virus subtype ayw, complete genome, GenBank: U95551.1),
  source 1..3182: mol_type = other DNA
aattccacaacctttcaccaaactctgcaagatcccagagtgagaggcctgtatttccctgctggtggctccagttcaggagcagtaaaccctgttccgactactgcctctcccttatcgtcaatcttctcgaggattggggaccctgcgctgaacatggagaacatcacatcaggattcctaggaccccttctcgtgttacaggcggggtttttcttgttgacaagaatcctcacaataccgcagagtctagactcgtggtggacttctctcaattttctagggggaactaccgtgtgtcttggccaaaattcgcagtccccaacctccaatcactcaccaacctcctgtcctccaacttgtcctggttatcgctggatgtgtctgcggcgttttatcatcttcctcttcatcctgctgctatgcctcatcttcttgttggttcttctggactatcaaggtatgttgcccgtttgtcctctaattccaggatcctcaaccaccagcacgggaccatgccgaacctgcatgactactgctcaaggaacctctatgtatccctcctgttgctgtaccaaaccttcggacggaaattgcacctgtattcccatcccatcatcctgggctttcggaaaattcctatgggagtgggcctcagcccgtttctcctggctcagtttactagtgccatttgttcagtggttcgtagggctttcccccactgtttggctttcagttatatggatgatgtggtattgggggccaagtctgtacagcatcttgagtccctttttaccgctgttaccaattttcttttgtctttgggtatacatttaaaccctaacaaaacaaagagatggggttactctctgaattttatgggttatgtcattggaagttatgggtccttgccacaagaacacatcatacaaaaaatcaaagaatgttttagaaaacttcctattaacaggcctattgattggaaagtatgtcaacgaattgtgggtcttttgggttttgctgccccatttacacaatgtggttatcctgcgttaatgcccttgtatgcatgtattcaatctaagcaggctttcactttctcgccaacttacaaggcctttctgtgtaaacaatacctgaacctttaccccgttgcccggcaacggccaggtctgtgccaagtgtttgctgacgcaacccccactggctggggcttggtcatgggccatcagcgcgtgcgtggaaccttttcggctcctctgccgatccatactgcggaactcctagccgcttgttttgctcgcagcaggtctggagcaaacattatcgggactgataactctgttgtcctctcccgcaaatatacatcgtatccatggctgctaggctgtgctgccaactggatcctgcgcgggacgtcctttgtttacgtcccgtcggcgctgaatcctgcggacgacccttctcggggtcgcttgggactctctcgtccccttctccgtctgccgttccgaccgaccacggggcgcacctctctttacgcggactccccgtctgtgccttctcatctgccggaccgtgtgcacttcgcttcacctctgcacgtcgcatggagaccaccgtgaacgcccaccgaatgttgcccaaggtcttacataagaggactcttggactctctgcaatgtcaacgaccgaccttgaggcatacttcaaagactgtttgtttaaagactgggaggagttgggggaggagattagattaaaggtctttgtactaggaggctgtaggcataaattggtctgcgcaccagcaccatgcaactttttcacctctgcctaatcatctcttgttcatgtcctactgttcaagcctccaagctgtgccttgggtggctttggggcatggacatcgacccttataaagaatttggagctactgtggagttactctcgtttttgccttctgacttctttccttcagtacgagatcttctagataccgcctcagctctgtatcgggaagccttagagtctcctgagcattgttcacctcaccatactgcactcaggcaagcaattctttgctggggggaactaatgactctagctacctgggtgggtgttaatttggaagatccagcatctagagacctagtagtcagttatgtcaacactaatatgggcctaaagttcaggcaactcttgtggtttcacatttcttgtctcacttttggaagagaaaccgttatagagtatttggtgtctttcggagtgtggattcgcactcctccagcttatagaccaccaaatgcccctatcctatcaacacttccggaaactactgttgttagacgacgaggcaggtcccctagaagaagaactccctcgcctcgcagacgaaggtctcaatcgccgcgtcgcagaagatctcaatctcgggaacctcaatgttagtattccttggactcataaggtggggaactttactggtctttattcttctactgtacctgtctttaatcctcattggaaaacaccatcttttcctaatatacatttacaccaagacattatcaaaaaatgtgaacagtttgtaggcccacttacagttaatgagaaaagaagattgcaattgattatgcctgctaggttttatccaaaggttaccaaatatttaccattggataagggtattaaaccttattatccagaacatctagttaatcattacttccaaactagacactatttacacactctatggaaggcgggtatattatataagagagaaacaacacatagcgcctcattttgtgggtcaccatattcttgggaacaagatctacagcatggggcagaatctttccaccagcaatcctctgggattctttcccgaccaccagttggatccagccttcagagcaaacacagcaaatccagattgggacttcaatcccaacaaggacacctggccagacgccaacaaggtaggagctggagcattcgggctgggtttcaccccaccgcacggaggccttttggggtggagccctcaggctcagggcatactacaaactttgccagcaaatccgcctcctgcctccaccaatcgccagacaggaaggcagcctaccccgctgtctccacctttgagaaacactcatcctcaggccatgcagtgg

SEQ ID NO: 651 - protein, 543 aa, Synthetic construct
  REGION 1..543: note = DNMT3A/L (AA)
NHDQEFDPPKVYPPVPAEKRKPIRVLSLFDGIATGLLVLKDLGIQVDRYIASEVCEDSITVGMVRHQGKIMYVGDVRSVTQKHIQEWGPFDLVIGGSPCNDLSIVNPARKGLYEGTGRLFFEFYRLLHDARPKEGDDRPFFWLFENVVAMGVSDKRDISRFLESNPVMIDAKEVSAAHRARYFWGNLPGMNRPLASTVNDKLELQECLEHGRIAKFSKVRTITTRSNSIKQGKDQHFPVFMNEKEDILWCTEMERVFGFPVHYTDVSNMSRLARQRLLGRSWSVPVIRHLFAPLKEYFACVSSGNSNANSRGPSFSSGLVPLSLRGSHMGPMEIYKTVSAWKRQPVRVLSLFRNIDKVLKSLGFLESGSGSGGGTLKYVEDVTNVVRRDVEKWGPFDLVYGSTQPLGSSCDRCPGWYMFQFHRILQYALPRQESQRPFFWIFMDNLLLTEDDQETTTRFLQTEAVTLQDVRGRDYQNAMRVWSNIPGLKSKHAPLTPKEEEYLQAQVRSRSKLDAPKVDLLVKNCLLPLREYFKYFSQNSLPL

SEQ ID NO: 652 - DNA, 255 bp, Synthetic construct
  misc_feature 1..255: note = N term Npu Intein (nt)
  source 1..255: mol_type = other DNA
tgcctgtcctacgagacagagatcctgacagtggagtatggcctgctgccaatcggcaagatcgtggagaagaggatcgagtgtaccgtgtactctgtggataacaatggcaacatctatacacagcccgtggcacagtggcacgataggggagagcaggaggtgttcgagtattgcctggaggacggcagcctgatcagggcaaccaaggaccacaagttcatgacagtggatggccagatgctgcccatcgac

SEQ ID NO: 653 - protein, 85 aa, Synthetic construct
  REGION 1..85: note = N term Npu Intein (aa)
CLSYETEILTVEYGLLPIGKIVEKRIECTVYSVDNNGNIYTQPVAQWHDRGEQEVFEYCLEDGSLIRATKDHKFMTVDGQMLPID

SEQ ID NO: 654 - DNA, 105 bp, Synthetic construct
  misc_feature 1..105: note = C term Npu Intein (nt)
  source 1..105: mol_type = other DNA
atcaagattgctacacggaaatacctgggaaagcagaacgtgtacgacatcggcgtggagcgggatcacaacttcgccctgaagaatggctttatcgccagcaat

SEQ ID NO: 655 - protein, 35 aa, Synthetic construct
  REGION 1..35: note = C term Npu Intein (aa)
IKIATRKYLGKQNVYDIGVERDHNFALKNGFIASN

SEQ ID NO: 656 - DNA, 2598 bp, Synthetic construct
  misc_feature 1..2598: note = dSpCas9-573-C Intein (nt)
  source 1..2598: mol_type = other DNA
atgaaacggacagccgacggaagcgagttcgagtcaccaaagaagaagcggaaagtcatcaagattgctacacggaaatacctgggaaagcagaacgtgtacgacatcggcgtggagcgggatcacaacttcgccctgaagaatggctttatcgccagcaattgtttcgactctgttgaaatcagcggagtggaggatcgcttcaacgcatccctgggaacgtatcacgatctcctgaaaatcattaaagacaaggacttcctggacaatgaggagaacgaggacattcttgaggacattgtcctcacccttacgttgtttgaagatagggagatgattgaagaacgcttgaaaacttacgctcatctcttcgacgacaaagtcatgaaacagctcaagaggcgccgatatacaggatgggggcggctgtcaagaaaactgatcaatgggatccgagacaagcagagtggaaagacaatcctggattttcttaagtccgatggatttgccaaccggaacttcatgcagttgatccatgatgactctctcacctttaaggaggacatccagaaagcacaagtttctggccagggggacagtcttcacgagcacatcgctaatcttgcaggtagcccagctatcaaaaagggaatactgcagaccgttaaggtcgtggatgaactcgtcaaagtaatgggaaggcataagcccgagaatatcgttatcgagatggcccgagagaaccaaactacccagaagggacagaagaacagtagggaaaggatgaagaggattgaagagggtataaaagaactggggtcccaaatccttaaggaacacccagttgaaaacacccagcttcagaatgagaagctctacctgtactacctgcagaacggcagggacatgtacgtggatcaggaactggacatcaatcggctctccgactacgacgtggatgccatcgtgccccagtcttttctcaaagatgattctattgataataaagtgttgacaagatccgataaaaatagagggaagagtgataacgtcccctcagaagaagttgtcaagaaaatgaaaaattattggcggcagctgctgaacgccaaactgatcacacaacggaagttcgataatctgactaaggctgaacgaggtggcctgtctgagttggataaagccggcttcatcaaaaggcagcttgttgagacacgccagatcaccaagcacgtggcccaaattctcgattcacgcatgaacaccaagtacgatgaaaatgacaaactgattcgagaggtgaaagttattactctgaagtctaagctggtctcagatttcagaaaggactttcagttttataaggtgagagagatcaacaattaccaccatgcgcatgatgcctacctgaatgcagtggtaggcactgcacttatcaaaaaatatcccaagcttgaatctgaatttgtttacggagactataaagtgtacgatgttaggaaaatgatcgcaaagtctgagcaggaaataggcaaggccaccgctaagtacttcttttacagcaatattatgaattttttcaagaccgagattacactggccaatggagagattcggaagcgaccacttatcgaaacaaacggagaaacaggagaaatcgtgtgggacaagggtagggatttcgcgacagtccggaaggtcctgtccatgccgcaggtgaacatcgttaaaaagaccgaagtacagaccggaggcttctccaaggaaagtatcctcccgaaaaggaacagcgacaagctgatcgcacgcaaaaaagattgggaccccaagaaatacggcggattcgattctcctacagtcgcttacagtgtactggttgtggccaaagtggagaaagggaagtctaaaaaactcaaaagcgtcaaggaactgctgggcatcacaatcatggagcgatcaagcttcgaaaaaaaccccatcgactttctcgaggcgaaaggatataaagaggtcaaaaaagacctcatcattaagcttcccaagtactctctctttgagcttgaaaacggccggaaacgaatgctcgctagtgcgggcgagctgcagaaaggtaacgagctggcactgccctctaaatacgttaatttcttgtatctggccagccactatgaaaagctcaaagggtctcccgaagataatgagcagaagcagctgttcgtggaacaacacaaacactaccttgatgagatcatcgagcaaataagcgaattctccaaaagagtgatcctcgccgacgctaacctcgataaggtgctttctgcttacaataagcacagggataagcccatcagggagcaggcagaaaacattatccacttgtttactctgaccaacttgggcgcgcctgcagccttcaagtacttcgacaccaccatagacagaaagcggtacacctctacaaaggaggtcctggacgccacactgattcatcagtcaattacggggctctatgaaacaagaatcgacctctctcagctcggtggagacaaaaggccggcggccacgaaaaaggccggccaggcaaaaaagaaaaagtga

SEQ ID NO: 657 - protein, 865 aa, Synthetic construct
  REGION 1..865: note = dSpCas9-573-C Intein (aa)
MKRTADGSEFESPKKKRKVIKIATRKYLGKQNVYDIGVERDHNFALKNGFIASNCFDSVEISGVEDRFNASLGTYHDLLKIIKDKDFLDNEENEDILEDIVLTLTLFEDREMIEERLKTYAHLFDDKVMKQLKRRRYTGWGRLSRKLINGIRDKQSGKTILDFLKSDGFANRNFMQLIHDDSLTFKEDIQKAQVSGQGDSLHEHIANLAGSPAIKKGILQTVKVVDELVKVMGRHKPENIVIEMARENQTTQKGQKNSRERMKRIEEGIKELGSQILKEHPVENTQLQNEKLYLYYLQNGRDMYVDQELDINRLSDYDVDAIVPQSFLKDDSIDNKVLTRSDKNRGKSDNVPSEEVVKKMKNYWRQLLNAKLITQRKFDNLTKAERGGLSELDKAGFIKRQLVETRQITKHVAQILDSRMNTKYDENDKLIREVKVITLKSKLVSDFRKDFQFYKVREINNYHHAHDAYLNAVVGTALIKKYPKLESEFVYGDYKVYDVRKMIAKSEQEIGKATAKYFFYSNIMNFFKTEITLANGEIRKRPLIETNGETGEIVWDKGRDFATVRKVLSMPQVNIVKKTEVQTGGFSKESILPKRNSDKLIARKKDWDPKKYGGFDSPTVAYSVLVVAKVEKGKSKKLKSVKELLGITIMERSSFEKNPIDFLEAKGYKEVKKDLIIKLPKYSLFELENGRKRMLASAGELQKGNELALPSKYVNFLYLASHYEKLKGSPEDNEQKQLFVEQHKHYLDEIIEQISEFSKRVILADANLDKVLSAYNKHRDKPIREQAENIIHLFTLTNLGAPAAFKYFDTTIDRKRYTSTKEVLDATLIHQSITGLYETRIDLSQLGGDKRPAATKKAGQAKKKK

SEQ ID NO: 658 - protein, 16 aa, Synthetic construct
  REGION 1..16: note = Linker (aa)
SGSETPGTSESATPES

SEQ ID NO: 659 - DNA, 1158 bp, Synthetic construct
  misc_feature 1..1158: note = DNMT3L (nt)
  source 1..1158: mol_type = other DNA
atggcggccatcccagccctggacccagaggccgagcccagcatggacgtgattttggtgggatccagtgagctctcaagctccgtttcacccgggacaggcagagatcttattgcatatgaagtcaaggctaaccagcgaaatatagaagacatctgcatctgctgcggaagtctccaggttcacacacagcaccctctgtttgagggagggatctgcgccccatgtaaggacaagttcctggatgccctcttcctgtacgacgatgacgggtaccaatcctactgctccatctgctgctccggagaaacgctgctcatctgcggaaaccctgattgcacccgatgctactgcttcgagtgtgtggatagcctggtcggccccgggacctcggggaaggtgcacgccatgagcaactgggtgtgctacctgtgcctgccgtcctcccgaagcgggctgctgcagcgtcggaggaagtggcgcagccagctcaaggccttctacgaccgagagtcggagaatccccttgagatgttcgaaaccgtgcctgtgtggaggagacagccagtccgggtgctgtccctttttgaagacatcaagaaagagctgacgagtttgggctttttggaaagtggttctgacccgggacaactgaagcatgtggttgatgtcacagacacagtgaggaaggatgtggaggagtggggacccttcgatcttgtgtacggcgccacacctcccctgggccacacctgtgaccgtcctcccagctggtacctgttccagttccaccggctcctgcagtacgcacggcccaagccaggcagccccaggcccttcttctggatgttcgtggacaatctggtgctgaacaaggaagacctggacgtcgcatctcgcttcctggagatggagccagtcaccatcccagatgtccacggcggatccttgcagaatgctgtccgcgtgtggagcaacatcccagccataaggagcaggcactgggctctggtttcggaagaagaattgtccctgctggcccagaacaagcagagctcgaagctcgcggccaagtggcccaccaagctggtgaagaactgctttctccccctaagagaatatttcaagtatttttcaacagaactcacttcctcttta

SEQ ID NO: 660 - DNA, 966 bp, Synthetic construct
  misc_feature 1..966: note = DNMT3A (nt)
  source 1..966: mol_type = other DNA
acctacgggctgctgcggcggcgagaggactggccctcccggctccagatgttcttcgctaataaccacgaccaggaatttgaccctccaaaggtttacccacctgtcccagctgagaagaggaagcccatccgggtgctgtctctctttgatggaatcgctacagggctcctggtgctgaaggacttgggcattcaggtggaccgctacattgcctcggaggtgtgtgaggactccatcacggtgggcatggtgcggcaccaggggaagatcatgtacgtcggggacgtccgcagcgtcacacagaagcatatccaggagtggggcccattcgatctggtgattgggggcagtccctgcaatgacctctccatcgtcaaccctgctcgcaagggcctctacgagggcactggccggctcttctttgagttctaccgcctcctgcatgatgcgcggcccaaggagggagatgatcgccccttcttctggctctttgagaatgtggtggccatgggcgttagtgacaagagggacatctcgcgatttctcgagtccaaccctgtgatgattgatgccaaagaagtgtcagctgcacacagggcccgctacttctggggtaaccttcccggtatgaacaggccgttggcatccactgtgaatgataagctggagctgcaggagtgtctggagcatggcaggatagccaagttcagcaaagtgaggaccattactacgaggtcaaactccataaagcagggcaaagaccagcattttcctgtcttcatgaatgagaaagaggacatcttatggtgcactgaaatggaaagggtatttggtttcccagtccactatactgacgtatccaacatgagccgcttggcgaggcagagactgctgggccggtcatggagcgtgccagtcatccgccacctcttcgctccgctgaaggagtattttgcgtgtgtg

SEQ ID NO: 661 - protein, 322 aa, Synthetic construct
  REGION 1..322: note = DNMT3A (AA)
TYGLLRRREDWPSRLQMFFANNHDQEFDPPKVYPPVPAEKRKPIRVLSLFDGIATGLLVLKDLGIQVDRYIASEVCEDSITVGMVRHQGKIMYVGDVRSVTQKHIQEWGPFDLVIGGSPCNDLSIVNPARKGLYEGTGRLFFEFYRLLHDARPKEGDDRPFFWLFENVVAMGVSDKRDISRFLESNPVMIDAKEVSAAHRARYFWGNLPGMNRPLASTVNDKLELQECLEHGRIAKFSKVRTITTRSNSIKQGKDQHFPVFMNEKEDILWCTEMERVFGFPVHYTDVSNMSRLARQRLLGRSWSVPVIRHLFAPLKEYFACV

SEQ ID NO: 662 - DNA, 1629 bp, Synthetic construct
  misc_feature 1..1629: note = DNMT3A/L v1 (nt)
  source 1..1629: mol_type = other DNA
aaccatgaccaggaatttgaccccccaaaggtttacccacctgtgccagctgagaagaggaagcccatccgcgtgctgtctctctttgatgggattgctacagggctcctggtgctgaaggacctgggcatccaagtggaccgctacattgcctccgaggtgtgtgaggactccatcacggtgggcatggtgcggcaccagggaaagatcatgtacgtcggggacgtccgcagcgtcacacagaagcatatccaggagtggggcccattcgacctggtgattggaggcagtccctgcaatgacctctccattgtcaaccctgcccgcaagggactttatgagggtactggccgcctcttctttgagttctaccgcctcctgcatgatgcgcggcccaaggagggagatgatcgccccttcttctggctctttgagaatgtggtggccatgggcgttagtgacaagagggacatctcgcgatttcttgagtctaaccccgtgatgattgacgccaaagaagtgtctgctgcacacagggcccgttacttctggggtaaccttcctggcatgaacaggcctttggcatccactgtgaatgataagctggagctgcaagagtgtctggagcacggcagaatagccaagttcagcaaagtgaggaccattaccaccaggtcaaactctataaagcagggcaaagaccagcatttccccgtcttcatgaacgagaaggaggacatcctgtggtgcactgaaatggaaagggtgtttggcttccccgtccactacacagacgtctccaacatgagccgcttggcgaggcagagactgctgggccgatcgtggagcgtgccggtcatccgccacctcttcgctccgctgaaggaatattttgcttgtgtgtctagcggcaatagtaacgctaacagccgcgggccgagcttcagcagcggcctggtgccgttaagcttgcgcggcagccatatgggccctatggagatatacaagacagtgtctgcatggaagagacagccagtgcgggtactgagcctcttcagaaacatcgacaaggtactaaagagtttgggcttcttggaaagcggttctggttctgggggaggaacgctgaagtacgtggaagatgtcacaaatgtcgtgaggagagacgtggagaaatggggcccctttgacctggtgtacggctcgacgcagcccctaggcagctcttgtgatcgctgtcccggctggtacatgttccagttccaccggatcctgcagtatgcgctgcctcgccaggagagtcagcggcccttcttctggatattcatggacaatctgctgctgactgaggatgaccaagagacaactacccgcttccttcagacagaggctgtgaccctccaggatgtccgtggcagagactaccagaatgctatgcgggtgtggagcaacattccagggctgaagagcaagcatgcgcccctgaccccaaaggaagaagagtatctgcaagcccaagtcagaagcaggagcaagctggacgccccgaaagttgacctcctggtgaagaactgccttctcccgctgagagagtacttcaagtatttttctcaaaactcacttcctctt

SEQ ID NO: 663 - DNA, 1629 bp, Synthetic construct
  misc_feature 1..1629: note = DNMT3A/L v2 (nt)
  source 1..1629: mol_type = other DNA
aaccacgatcaggagtttgacccccctaaggtgtacccacccgtgccagccgagaagaggaagcccatccgcgtgctgtccctgttcgacggcatcgccacaggcctgctggtgctgaaggatctgggcatccaggtggacagatatatcgcctccgaggtgtgcgaggattctatcaccgtgggcatggtgaggcaccagggcaagatcatgtacgtgggcgacgtgcgcagcgtgacacagaagcacatccaggagtggggacccttcgacctggtcatcggaggcagcccctgtaatgacctgtccatcgtgaaccctgcaaggaagggcctgtatgagggaaccggcagactgttctttgagttctacaggctgctgcacgacgcccgccctaaggagggcgatgacaggccattcttttggctgtttgagaacgtggtggccatgggcgtgagcgacaagcgggatatctccagattcctggagtctaatcccgtgatgatcgatgcaaaggaggtgtctgccgcacacagggcaaggtacttttggggaaatctgcctggcatgaaccgcccactggccagcaccgtgaacgacaagctggagctgcaggagtgcctggagcacggaaggatcgccaagttctccaaggtgcggacaatcaccacaagatctaacagcatcaagcagggcaaggatcagcacttccccgtgttcatgaatgagaaggaggacatcctgtggtgtaccgagatggagcgcgtgttcggctttccagtgcactatacagacgtgagcaatatgagccggctggcaaggcagagactgctgggccggtcctggtctgtgccagtgatcagacacctgttcgcccccctgaaggagtactttgcctgcgtgtctagcggcaactctaatgccaacagcagaggcccttccttttcctctggcctggtgccactgtctctgaggggcagccacatgggccccatggagatctacaagaccgtgtccgcctggaagaggcagcctgtgcgcgtgctgtctctgttccgcaacatcgacaaggtgctgaagagcctgggctttctggagagcggatccggatctggaggaggcaccctgaagtatgtggaggatgtgacaaatgtggtgcggagagatgtggagaagtggggccccttcgatctggtgtacggatccacccagccactgggaagctcctgcgataggtgtccaggatggtatatgttccagtttcacagaatcctgcagtacgcactgccaaggcaggagagccagcgccctttcttttggatctttatggacaacctgctgctgacagaggatgaccaggagacaacaacccgcttcctgcagacagaggcagtgaccctgcaggatgtgaggggacgcgactatcagaatgccatgcgggtgtggtctaacatccctggcctgaagagcaagcacgcccccctgacccctaaggaggaggagtacctgcaggcccaggtgcggagcagatccaagctggatgcccctaaggtggacctgctggtgaagaattgtctgctgccactgcgggagtacttcaagtactttagtcagaatagcctgccactg

SEQ ID NO: 664 - protein, 215 aa, Synthetic construct
  REGION 1..215: note = Murine DNMT3L
MGPMEIYKTVSAWKRQPVRVLSLFRNIDKVLKSLGFLESGSGSGGGTLKYVEDVTNVVRRDVEKWGPFDLVYGSTQPLGSSCDRCPGWYMFQFHRILQYALPRQESQRPFFWIFMDNLLLTEDDQETTTRFLQTEAVTLQDVRGRDYQNAMRVWSNIPGLKSKHAPLTPKEEEYLQAQVRSRSKLDAPKVDLLVKNCLLPLREYFKYFSQNSLPL

SEQ ID NO: 665 - protein, 301 aa, Homo sapiens
  REGION 1..301: note = Human DNMT3A
NHDQEFDPPKVYPPVPAEKRKPIRVLSLFDGIATGLLVLKDLGIQVDRYIASEVCEDSITVGMVRHQGKIMYVGDVRSVTQKHIQEWGPFDLVIGGSPCNDLSIVNPARKGLYEGTGRLFFEFYRLLHDARPKEGDDRPFFWLFENVVAMGVSDKRDISRFLESNPVMIDAKEVSAAHRARYFWGNLPGMNRPLASTVNDKLELQECLEHGRIAKFSKVRTITTRSNSIKQGKDQHFPVFMNEKEDILWCTEMERVFGFPVHYTDVSNMSRLARQRLLGRSWSVPVIRHLFAPLKEYFACV

SEQ ID NO: 666 - protein, 213 aa, Homo sapiens
  REGION 1..213: note = C-terminal human DNM3L
NPLEMFETVPVWRRQPVRVLSLFEDIKKELTSLGFLESGSDPGQLKHVVDVTDTVRKDVEEWGPFDLVYGATPPLGHTCDRPPSWYLFQFHRLLQYARPKPGSPRPFFWMFVDNLVLNKEDLDVASRFLEMEPVTIPDVHGGSLQNAVRVWSNIPAIRSRHWALVSEEELSLLAQNKQSSKLAAKWPTKLVKNCFLPLREYFKYFSTELTSSL

SEQ ID NO: 667 - protein, 27 aa, Synthetic construct
  REGION 1..27: note = Linker
SSGNSNANSRGPSFSSGLVPLSLRGSH

SEQ ID NO: 668 - protein, 421 aa, Synthetic construct
  REGION 1..421: note = Murine DNMT3L
MGSRETPSSCSKTLETLDLETSDSSSPDADSPLEEQWLKSSPALKEDSVDVVLEDCKEPLSPSSPPTGREMIRYEVKVNRRSIEDICLCCGTLQVYTRHPLFEGGLCAPCKDKFLESLFLYDDDGHQSYCTICCSGGTLFICESPDCTRCYCFECVDILVGPGTSERINAMACWVCFLCLPFSRSGLLQRRKRWRHQLKAFHDQEGAGPMEIYKTVSAWKRQPVRVLSLFRNIDKVLKSLGFLESGSGSGGGTLKYVEDVTNVVRRDVEKWGPFDLVYGSTQPLGSSCDRCPGWYMFQFHRILQYALPRQESQRPFFWIFMDNLLLTEDDQETTTRFLQTEAVTLQDVRGRDYQNAMRVWSNIPGLKSKHAPLTPKEEEYLQAQVRSRSKLDAPKVDLLVKNCLLPLREYFKYFSQNSLPL

SEQ ID NO: 669 - protein, 87 aa, Synthetic construct
  REGION 1..87: note = KRAB
RTLVTFKDVFVDFTREEWKLLDTAQQILYRNVMLENYKNLVSLGYQLTKPDVILRLEKGEEPWLVEREIHQETHPDSETAFEIKSSV

SEQ ID NO: 670 - protein, 15 aa, Synthetic construct
  REGION 1..15: note = NLS and linker
PKKKRKVGIHGVPAA

SEQ ID NO: 671 - protein, 8 aa, Synthetic construct
  REGION 1..8: note = Flag tag
DYKDDDDK

SEQ ID NO: 672 - protein, 17 aa, Synthetic construct
  REGION 1..17: note = Linker
EASGSGRASPGIPGSTR

SEQ ID NO: 673 - protein, 8 aa, Synthetic construct
  REGION 1..8: note = Linker
GIHGVPAA

SEQ ID NO: 674 - protein, 23 aa, Synthetic construct
  REGION 1..23: note = 3 x Flag peptide
MDYKDHDGDYKDHDIDYKDDDDK

SEQ ID NO: 675 - protein, 9 aa, Synthetic construct
  REGION 1..9: note = HA tag
YPYDVPDYA

SEQ ID NO: 676 - protein, 6 aa, Synthetic construct
  REGION 1..6: note = poly-histidine tag
HHHHHH

SEQ ID NO: 677 - protein, 27 aa, Synthetic construct
  REGION 1..27: note = Linker
KRPAATKKAGQAKKKKASDAKSLTAWS

SEQ ID NO: 678 - DNA, 3222 bp, Synthetic construct
  misc_feature 1..3222: note = Hep3B Consensus sequence (3222bp)
  misc_feature 1: note = n = A,T,C or G
  misc_feature 2100..2293: note = n = A,T,C or G
  source 1..3222: mol_type = other DNA
ntccacagccttccaccaagctctgcaggatcccagagtcaggggtctgtattttcctgctggtggctccagttcaggaacagtaaaccctgctccgaatattgcctctcacatctcgtcaatctccgcgaggactggggaccctgtgacgaacatggagaacatcacatcaggattcctaggacccctgctcgtgttacaggcggggtttttctcgttgacaagaatcctcacaataccgcagagtctagactcgtggtggacttctctcagttttctagggggtccacccgtgtgtcttggccaaaattcgcagtccccaacctccaatcactcaccaacctcctgtcctccaatctgtcctggttatcgctggatgtgtctgcggcgttttatcatattcctcttcatcctgctgctatgcctcatcttcttattggttcttctggattatcaaggtatgttgcccgtttgtcctctaattccaggatcaacaacaaccagtacgggaccatgcaaaacctgcacgactcctgctcaaggcaactctatgtttccctcatgttgctgtacaaaacctacggatggaaattgcacctgtattcccatcccatcgtcttgggctttcgcaaaatacctatgggagtgggcctcagtccgtttctcttggctcagtttactagtgccatttgttcagtggttcgtagggctttcccccactgtttggctttcagctatatggatgatgtggtattgggggccaagactgtacagcatcgtgagtccctttataccgctgttaccaattttcttttgtctctgggtatacatttaaaccctaacaaaacaaaaagatggggttattccctaaacttcatgggttacgtaattggaagttgggggacattgccacaagatcatattgtacaaaagatcaaacactgttttagaaaacttcctgtaaacaggcctattgattggaaagtatgtcaaaggattgtgggtcttttgggctttgctgctccatttacacaatgtggatatcctgccttaatgcctttgtatgcatgtatacaagctaaacaggctttcactttctcgccaacttacaaggcctttctaagtaaacagtacctgaacctttaccccgttgctcggcaacggccaggtctgtgccaagtgtttgctgacgcaacccccactggctggggcttagccataggccatcagcgcatgcgtggaacctttgtggctcctctgccgatccatactgcggaactcctagccgcttgttttgctcgcagccggtctggagcaaagctcatcggaactgacaattctgtcgtcctctcgcggaaatatacatcgtttccatggctgctaggctgtactgccaactggatccttcgcgggacgtcctttgtttacgtcccgtcggcgctgaatcccgcggacgacccctctcggggccgcttgggactctctcgtccccttctccgtctgccgttccagccgaccacggggcgcacctctctttacgcggtctccccgtctgtgccttctcatctgccggtccgtgtgcacttcgcttcacctctgcacgttgcatggagaccaccgtgaacgcccatcagagcctgcccaaggtcttacataagaggactcttggactcccagcaatgtcaacgaccgaccttgaggcctacttcaaagactgtgtgtttaaggactgggaggagctgggggaggagattaggttaatgatctttgtattaggaggctgtaggcatgagccttttatgcctaagaatgtgtctgtctcataatgcaagtggtcaatccagccagcaccatgcgaactttttcacctctgcctaatcatctcttgtacatgtcccactgttcaagcctccaagctgtgccttgggtggctttggggcatggacattgacccttataaagaatttggagctactgtggagttactctcgtttttgccttctgacttttttccttccgtcagagatctcctagacaccgcctcagctctgtatcgggaagccttagagtctcctgagcattgctctcctcaccatactnnnnnnnnnnnnnnnnnnnnnnnnnnnnnnnnnnnnnnnnnnnnnnnnnnnnnnnnnnnnnnnnnnnnnnnnnnnnnnnnnnnnnnnnnnnnnnnnnnnnnnnnnnnnnnnnnnnnnnnnnnnnnnnnnnnnnnnnnnnnnnnnnnnnnnnnnnnnnnnnnnnnnnnnnnnnnnnnnnnnnnnnnnnnnnnnnnnnnnnnnnnnnnnnnnnnnnnnnnnnnnnnnnnnnnnnnnnnnnnnnnnnnnnnnnnnnnnnnnnnnnnnnnnnnnnnnnnnnnnnnnnnnnnnnnnnnnnnnnnnnnnnnnnnnnnnnnnnnnnnnnnnnnnnnnnnnnnnnnnnnnnnnnnnnnnnnnnnnnnnnnnnnnnnnnnnnnnnnnnnnnnnnnnnnnnnnnnnnnnnnnnnnnnnnnnnnnnnnnnnnnnnnnnnnnnnnnnnnnnnnnnnnnnnnnnnnnnnnnnnnnnnnnnnnnnnnnnnnnnnnnnnnnnnnnnnnnnnnnnnnnnnnnnnnnnnnnnnnnnnnnnnnnnnnnnnnnnnnnnnnnnnnnnnnnnnnnnnnnnnnnnnnnnnnnnnnnnnnnnnnnnnnnnnnnnnnnnnnnnnnnnnnnnnnnnnnnnnnnnnnnnnnnnnnnnnnnnnnnnnnnnnnnnnnnnnnnnnnnnnnnnnnnnnnnnnnnnnnnnnnnnnnnnnnnnnnnnnnnnnnnnnnnnnnnnnnnnnnnnnnnnnnnnnnnnnnnnnnnnnnnnnnnnnnnnnnnnnnnnnnnnnnnnnnnnnnnnnnnnnnnnnnnnnnnnnnnnnnnnnnnnnnnnnnnnnnnncctctgggattctttcccgatcatcagttggaccnnnnnnnnnnnnnnnnnnnnnnnaatccagattgggacttcaaccccatcaaggaccactggccagcagccaaccaggtaggagtgggagcattcgggccagggttcacccctccacacggcggtgttttggggtggagccctcaggctcagggcatactacaaactgtgtcaacaattcctcctcctgcctccaccaatcggcagtcaggaaggcagcctactcccatctctccacctctaaaagacagtcatcctcaggccacgcagtggaa

SEQ ID NO: 679 - DNA, 3213 bp, Synthetic construct
  misc_feature 1..3213: note = PLC/PRF/5 Cells (Alexander Cells) Consensus Genome: LC533934.1 (3213 bp)
  source 1..3213: mol_type = other DNA
ttccacagccttccaccaagctctgcaagatcccagagtcaggggcctgtattttcctgctggtggctccagttcaggaacagtaaaccctgctcagaatattgcctctcacatctcgtcaatctcctcgaggactggggaccctgcaccgaacatggagaacattacatcaggattcctaggacccctgctcgtgttacaggcggggtttttcttgttgacaagaatcctcacaataccacagagtctagactcgtggtggacttctctcaattttctagggggatcacccgtgtgtcttggccaaaattcgcagtccccaacctccaatcactcaccaacctcctgtcctccaatttgtcctggttatcgctggatgtgtctgcggcgttttatcatattcctcttcatcctgctgctatgcctcatcttcttattggttcttctggactatcaaggtatgttgcccgtttgtcctctaattccaggatccacaacaaccagtacgggaccctgcaaaacctgcacgactcctgctcaaggcaactctatgtttccctcatgttgctgtacaaaacctacggatggaaattgcacctgtattcccatcccatcatcttgggctttcgcaaaatacctatgggagtggggctcagtccgtttctcttggctcagtttactagtgccatttgttcagtggttcgtagggctttcccccactgtttggctttcagttatatggatgatgtggtattgggggccaaatctgtacaacatcttgagtccctttataccgctgttaccaattttcttttgtctttgggtatacatttaaaccctaacaaaacgaagagatggggttattccctaaacttcatgggatatgtaattggaagttggggtaccttgccacaggatcatattgtacaaaaaatcaaacgctgttttaggaaacttcctgtcaatcgacctattgattggaaagtatgtcaaagaattgtgggtcttttgggctttgccgcgccctttacacaatgtggttaccctgccttaatgcctttatatgcatgtatacaagcaaaacaggcttttactttctcgccaacttacaaggcctttctaagtaaacagtatatgaacctttaccccgttgcccggcaacggcctggcctgtgccaagtgtttgctgacgcaacccccactggctggggcttggctatgggccatcagcgcatgcgtggaacctttgtggctcctctgccgatccatactgcggaacttcttgcagcttgttttgctcgcagccggtctggagcgaaactcatcgggactgataattctgtcgtcctttctcggaaatatacatcatttccatggctgctaggttgtgctgctaactggattcttcgcgggacgtcctttgtctacgtcccgtcggcgctgaatcctgcggacgacccctcccggggccgcttgggactctatcgtccccttcttcgtctgccgtaccgtccgaccacggggcgcacctctctttacgcggtctccccgtctgtgccttctcatctgccggtccgtgtgcacttcgcttcacctctgcacgttgcatggagaccaccgtgaacgcccatcggatcctgcccaaggtcttacataagaggactcttggactcccagcaatgtcaacgaccgaccttgaggcttacttcaaagactgtgtgtttaaagactgggaggagttgggggaggagattaggttaaatattaggaggctgtaggcataaattggtctgcgcaccatcatcatgcaactttttcacctctgcctattcatctctcgttcatgtcctactgttcaagcctccaagctgtgccttgggtggctttagggcatggacattgacccttataaagaatttggagctactgtggagttactctcgtttttgccttctgacttctttccttcggtccgagatctcctagacaccgcctcagctctatatcgggaagccttagagtctcctgagcattgttcccctcatcatacagcactcaggcaagcaattctttgctggggggaattaatgactctagctacctgggtgggtaataatttggaagatccagcatccagggatctagtagtcaattatgtgaatactaacatgggcctaaagatcagacaactattgtggtttcatatttcttgccttacttttggaagagaaacagtgcttgagtatttggtctccttcggagtgtggattcgcactcctccagcctatagaccaccaaatgcccctatcttatcaacacttccggaaactactgttgttagacgacgagaccgaggcaggtcccctagaagaagaactccctcgcctcgcagacgaagatctcaatcgccgcgtcgcagaagatctcaatctcgggaatctcaatgttagtattccttggactcataaggtgggaaattttactgggctttattcctctactgtccctatctttaatcctgaatggcaaacgccttcctttcctaaaatccatttacacgaggacattattaataggtgtcagcaatttgtaggccctctcactgtaaatgaaaagagaagattgaacttaattatgcctgctaggttttatcctaactccactaaatatttgcctctagacaaaggaattaagccttattatcctgaacatgtagttaatcattacttccagacccgacattatttacatactctttggaaggctgggattctatataagagggaaactacacgtagcgcctcattttgcgggtcaccatattcttgggaacaagagctacatcatgggaggttggttaccaaaacctcgcaaaggcatggggacgaatctgtctgtccccaaccctctgggattctttcccgatcatcagttggacccagcattcggagccaattcaaacaatccagactgggacttcaaccccacaaaggaccactggccacaagccaaccaggtaggagtgggagcattcggcccagggttcacccctccacacggaggtcttttggggtggagctctcaggctcaaggcacattgcatactgtgccagcagtgcctcctcctgcctccaccaatcggcagtcaggaaggcagcctactcccatctctccacctctaagagacagtcatcctcaggccatgcagtggaa

SEQ ID NO: 680 - RNA, 6433 nt, synthetic construct
  source 1..6433: mol_type = other RNA
  misc_feature 1..6433: note = pTT0728_HBVg_mRNA_1
ggagcaattgaccgggaagctcagaataaacgctcaactttggccggatcttctagagccaccatgaaccacgatcaggagtttgacccccctaaggtgtacccacccgtgccagccgagaagaggaagcccatccgcgtgctgtccctgttcgacggcatcgccacaggcctgctggtgctgaaggatctgggcatccaggtggacagatatatcgcctccgaggtgtgcgaggattctatcaccgtgggcatggtgaggcaccagggcaagatcatgtacgtgggcgacgtgcgcagcgtgacacagaagcacatccaggagtggggacccttcgacctggtcatcggaggcagcccctgtaatgacctgtccatcgtgaaccctgcaaggaagggcctgtatgagggaaccggcagactgttctttgagttctacaggctgctgcacgacgcccgccctaaggagggcgatgacaggccattcttttggctgtttgagaacgtggtggccatgggcgtgagcgacaagcgggatatctccagattcctggagtctaatcccgtgatgatcgatgcaaaggaggtgtctgccgcacacagggcaaggtacttttggggaaatctgcctggcatgaaccgcccactggccagcaccgtgaacgacaagctggagctgcaggagtgcctggagcacggaaggatcgccaagttctccaaggtgcggacaatcaccacaagatctaacagcatcaagcagggcaaggatcagcacttccccgtgttcatgaatgagaaggaggacatcctgtggtgtaccgagatggagcgcgtgttcggctttccagtgcactatacagacgtgagcaatatgagccggctggcaaggcagagactgctgggccggtcctggtctgtgccagtgatcagacacctgttcgcccccctgaaggagtactttgcctgcgtgtctagcggcaactctaatgccaacagcagaggcccttccttttcctctggcctggtgccactgtctctgaggggcagccacatgggccccatggagatctacaagaccgtgtccgcctggaagaggcagcctgtgcgcgtgctgtctctgttccgcaacatcgacaaggtgctcaagagcctgggctttctggagagcggatccggatctggaggaggcaccctgaagtatgtggaggatgtgacaaatgtggtgcggagagatgtggagaagtggggccccttcgatctggtgtacggatccacccagccactgggaagctcctgcgataggtgtccaggatggtatatgttccagtttcacagaatcctgcagtacgcactgccaaggcaggagagccagcgccctttcttttggatctttatggacaacctgctgctgacagaggatgaccaggagacaacaacccgcttcctgcagacagaggcagtgaccctgcaggatgtgaggggacgcgactatcagaatgccatgcgggtgtggtctaacatccctggcctgaaaagcaagcacgcccccctgacccctaaggaggaggagtacctgcaggcccaggtgcggagcagatccaagctggatgcccctaaggtggacctgctggtgaagaattgtctgctgccactgcgggagtacttcaagtactttagtcagaatagcctgccactggaggcaagcggatccggaagggcatctcctggaatcccaggaagcacccgcaaccccaagaagaagcggaaggtgggcatccacggcgtgcccgccgccgacaagaagtacagcatcggcctggccatcggcaccaacagcgtgggctgggccgtgatcaccgacgagtacaaggtgcccagcaagaagttcaaggtgctgggcaacaccgaccggcacagcatcaagaagaacctgatcggcgccctgctgttcgacagcggcgagaccgccgaggccacccggctgaagcggaccgcccggcggcggtacacccggcggaagaaccggatctgctacctgcaggagatcttcagcaacgagatggccaaggtggacgacagcttcttccaccggctggaggagagcttcctggtggaggaggacaagaagcacgagcggcaccccatcttcggcaacatcgtggacgaggtggcctaccacgagaagtaccccaccatctaccacctgcggaagaagctggtggacagcaccgacaaggccgacctgcggctgatctacctggccctggcccacatgatcaagttccggggccacttcctgatcgagggcgacctgaaccccgacaacagcgacgtggacaagctgttcatccagctggtgcagacctacaaccagctgttcgaggagaaccccatcaacgccagcggcgtggacgccaaggccatcctgagcgcccggctgagcaagagccggcggctggagaacctgatcgcccagctgcccggcgagaagaagaacggcctgttcggcaacctgatcgccctgagcctgggcctgacccccaacttcaagagcaacttcgacctggccgaggacgccaagctgcagctgagcaaggacacctacgacgacgacctggacaacctgctggcccagatcggcgaccagtacgccgacctgttcctggccgccaagaacctgagcgacgccatcctgctgagcgacatcctgcgggtgaacaccgagatcaccaaggcccccctgagcgccagcatgatcaagcggtacgacgagcaccaccaggacctgaccctgctgaaggccctggtgcggcagcagctgcccgagaagtacaaggagatcttcttcgaccagagcaagaacggctacgccggctacatcgacggcggcgccagccaggaggagttctacaagttcatcaagcccatcctggagaagatggacggcaccgaggagctgctggtgaagctgaaccgggaggacctgctgcggaagcagcggaccttcgacaacggcagcatcccccaccagatccacctgggcgagctgcacgccatcctgcggcggcaggaggacttctaccccttcctgaaggacaaccgggagaagatcgagaagatcctgaccttccggatcccctactacgtgggccccctggcccggggcaacagccggttcgcctggatgacccggaaaagcgaggagaccatcaccccctggaacttcgaggaggtggtggacaagggcgccagcgcccagagcttcatcgagcggatgaccaacttcgacaagaacctgcccaacgagaaggtgctgcccaagcacagcctgctgtacgagtacttcaccgtgtacaacgagctgaccaaggtgaagtacgtgaccgagggcatgcggaagcccgccttcctgagcggcgagcagaagaaggccatcgtggacctgctgttcaagaccaaccggaaggtgaccgtgaagcagctgaaggaggactacttcaagaagatcgagtgcttcgacagcgtggagatcagcggcgtggaggaccggttcaacgccagcctgggcacctaccacgacctgctgaagatcatcaaggacaaggacttcctggacaacgaggagaacgaggacatcctggaggacatcgtgctgaccctgaccctgttcgaggaccgggagatgatcgaggagcggctgaagacctacgcccacctgttcgacgacaaggtgatgaagcagctgaagcggcggcggtacaccggctggggccggctgagccggaagctgatcaacggcatccgggacaagcagagcggcaagaccatcctggacttcctgaaaagcgacggcttcgccaaccggaacttcatgcagctgatccacgacgacagcctgaccttcaaggaggacatccagaaggcccaggtgagcggccagggcgacagcctgcacgagcacatcgccaacctggccggcagccccgccatcaagaagggcatcctgcagaccgtgaaggtggtggacgagctggtgaaggtgatgggccggcacaagcccgagaacatcgtgatcgagatggcccgggagaaccagaccacccagaagggccagaagaacagccgggagcggatgaagcggatcgaggagggcatcaaggagctgggcagccagatcctgaaggagcaccccgtggagaacacccagctgcagaacgagaagctgtacctgtactacctgcagaacggccgggacatgtacgtggaccaggagctggacatcaaccggctgagcgactacgacgtggacgccatcgtgccccagagcttcctgaaggacgacagcatcgacaacaaggtgctgacccggagcgacaagaaccggggcaagagcgacaacgtgcccagcgaggaggtggtgaagaagatgaagaactactggcggcagctgctgaacgccaagctgatcacccagcggaagttcgacaacctgaccaaggccgagcggggcggcctgagcgagctggacaaggccggcttcatcaagcggcagctggtggagacccggcagatcaccaagcacgtggcccagatcctggacagccggatgaacaccaagtacgacgagaacgacaagctgatccgggaggtgaaggtgatcaccctgaaaagcaagctggtgagcgacttccggaaggacttccagttctacaaggtgcgggagatcaacaactaccaccacgcccacgacgcctacctgaacgccgtggtgggcaccgccctgatcaagaagtaccccaagctggagagcgagttcgtgtacggcgactacaaggtgtacgacgtgcggaagatgatcgccaagagcgagcaggagatcggcaaggccaccgccaagtacttcttctacagcaacatcatgaacttcttcaagaccgagatcaccctggccaacggcgagatccggaagcggcccctgatcgagaccaacggcgagaccggcgagatcgtgtgggacaagggccgggacttcgccaccgtgcggaaggtgctgagcatgccccaggtgaacatcgtgaagaagaccgaggtgcagaccggcggcttcagcaaggagagcatcctgcccaagcggaacagcgacaagctgatcgcccggaagaaggactgggaccccaagaagtacggcggcttcgacagccccaccgtggcctacagcgtgctggtggtggccaaggtggagaagggcaagagcaagaagctgaaaagcgtgaaggagctgctgggcatcaccatcatggagcggagcagcttcgagaagaaccccatcgacttcctggaggccaagggctacaaggaggtgaagaaggacctgatcatcaagctgcccaagtacagcctgttcgagctggagaacggccggaagcggatgctggccagcgccggcgagctgcagaagggcaacgagctggccctgcccagcaagtacgtgaacttcctgtacctggccagccactacgagaagctgaagggcagccccgaggacaacgagcagaagcagctgttcgtggagcagcacaagcactacctggacgagatcatcgagcagatcagcgagttcagcaagcgggtgatcctggccgacgccaacctggacaaggtgctgagcgcctacaacaagcaccgggacaagcccatccgggagcaggccgagaacatcatccacctgttcaccctgaccaacctgggcgcccccgccgccttcaagtacttcgacaccaccatcgaccggaagcggtacaccagcaccaaggaggtgctggacgccaccctgatccaccagagcatcaccggcctgtacgagacccggatcgacctgagccagctgggcggcgacagcggcggcaagcggcccgccgccaccaagaaggccggccaggccaagaagaagaaggctagcgatgctaagtcactgactgcctggtcccggacactggtgaccttcaaggatgtgtttgtggacttcaccagggaggagtggaagctgctggacactgctcagcagatcctgtacagaaatgtgatgctggagaactataagaacctggtttccttgggttatcagcttactaagccagatgtgatcctccggttggagaagggagaggaaccctggctggtggagagagaaattcaccaagagacccatcctgattcagagactgcatttgaaatcaaatcatcagttccgaaaaagaaacgcaaagtttagtaagaattcaaagaaagtttcttcacattctctcgagcgtacgaaaaaaaaaaaaaaaaaaaaaaaaaaaaaaaaaaaaaaaaaaaaaaaaaaaaaaaaaaaaaaaaaaaaaaaaaaaaaaaaaaaaaaaaaaaaaaaaaaaaaaaaaaaaaaaaaaaaaaaa

SEQ ID NO: 681 - RNA, 63 nt, Synthetic construct
  misc_feature 1..63: note = 5' UTR (5U4)
  source 1..63: mol_type = other RNA
ggagcaattgaccgggaagctcagaataaacgctcaactttggccggatcttctagagccacc

SEQ ID NO: 682 - RNA, 46 nt, Synthetic construct
  misc_feature 1..46: note = 3' UTR (3U2)
  source 1..46: mol_type = other RNA
tagtaagaattcaaagaaagtttcttcacattctctcgagcgtacg

SEQ ID NO: 683 - protein, 87 aa, Synthetic construct; identical to SEQ ID NO: 669
  REGION 1..87: note = KRAB

SEQ ID NO: 684 - protein, 15 aa, Synthetic construct
  REGION 1..15: note = NLS and linker
PKKKRKVGIHGVPAA

SEQ ID NO: 685 - protein, 8 aa, Synthetic construct
  REGION 1..8: note = Flag tag
DYKDDDDK

SEQ ID NO: 686 - protein, 17 aa, Synthetic construct
  REGION 1..17: note = Linker
EASGSGRASPGIPGSTR

SEQ ID NO: 687 - protein, 8 aa, Synthetic construct
  REGION 1..8: note = Linker
GIHGVPAA

SEQ ID NO: 688 - protein, 23 aa, Synthetic construct
  REGION 1..23: note = 3 x Flag peptide
MDYKDHDGDYKDHDIDYKDDDDK

SEQ ID NO: 689 - protein, 9 aa, Synthetic construct
  REGION 1..9: note = HA tag
YPYDVPDYA

SEQ ID NO: 690 - protein, 6 aa, Synthetic construct
  REGION 1..6: note = poly-histidine tag
HHHHHH

SEQ ID NO: 691 - protein, 27 aa, Synthetic construct
  REGION 1..27: note = Linker
KRPAATKKAGQAKKKKASDAKSLTAWS

SEQ ID NO: 692 - protein, 180 aa, Synthetic construct
  REGION 1..180: note = ZFP AA sequence
AAMAERPFQCRICMRNFSSEADRSRHIRTHTGEKPFACDICGRKFADRSNLTRHTKIHTGSQKPFQCRICMRNFSQSSDLSRHIRTHTGEKPFACDICGRKFAYHWYLKKHTKIHTGSQKPFQCRICMRNFSRSDSLSVHIRTHTGEKPFACDICGRKFAQNANRKTHTKIHLRQKDAAR

SEQ ID NO: 693 - protein, 180 aa, Synthetic construct
  REGION 1..180: note = ZFP AA sequence
AAMAERPFQCRICMRNFSRSDVLSTHIRTHTGEKPFACDICGKKFADNSSRTRHTKIHTGSQKPFQCRICMRNFSRPYTLRLHIRTHTGEKPFACDICGRKFADSSHRTRHTKIHTGSQKPFQCRICMRNFSRSDHLSQHIRTHTGEKPFACDICGRKFADSSHRTRHTKIHLRQKDAAR

SEQ ID NO: 694 - protein, 180 aa, Synthetic construct
  REGION 1..180: note = ZFP AA sequence
AAMAERPFQCRICMRNFSRSDHLSQHIRTHTGEKPFACDICGRKFAQSADRTKHTKIHTGSQKPFQCRICMRNFSRSDHLSQHIRTHTGEKPFACDICGRKFARRSDLKRHTKIHTGSQKPFQCRICMRNFSRSDHLSRHIRTHTGEKPFACDICGRKFAQSSDLRRHTKIHLRQKDAAR

SEQ ID NO: 695 - protein, 180 aa, Synthetic construct
  REGION 1..180: note = ZFP AA sequence
AAMAERPFQCRICMRNFSRSDNLSEHIRTHTGEKPFACDICGRKFATSSNRKTHTKIHTGSQKPFQCRICMRNFSDRSHLTRHIRTHTGEKPFACDICGRKFARSDALTQHTKIHTGSQKPFQCRICMRNFSDRSALARHIRTHTGEKPFACDICGRKFARRFTLSKHTKIHLRQKDAAR

SEQ ID NO: 696 - protein, 180 aa, Synthetic construct
  REGION 1..180: note = ZFP AA sequence
AAMAERPFQCRICMRNFSRSDHLSEHIRTHTGEKPFACDICGRKFAQYSGRYYHTKIHTGSQKPFQCRICMRNFSHGQTLNEHIRTHTGEKPFACDICGRKFAQSGNLARHTKIHTGSQKPFQCRICMRNFSRSDSLLRHIRTHTGEKPFACDICGRKFACREYRGKHTKIHLRQKDAAR

SEQ ID NO: 697 - protein, 180 aa, Synthetic construct
  REGION 1..180: note = ZFP AA sequence
AAMAERPFQCRICMRNFSQSANRTTHIRTHTGEKPFACDICGRKFARSANLTRHTKIHTGSQKPFQCRICMRNFSRSDVLSEHIRTHTGEKPFACDICGRKFATSGHLSRHTKIHTGSQKPFQCRICMRNFSQSSDLSRHIRTHTGEKPFACDICGRKFAQWSTRKRHTKIHLRQKDAAR

SEQ ID NO: 698 - protein, 180 aa, Synthetic construct
  REGION 1..180: note = ZFP AA sequence
AAMAERPFQCRICMRNFSQSGNLARHIRTHTGEKPFACDICGRKFAATCCLAHHTKIHTGSQKPFQCRICMRNFSRWQYLPTHIRTHAGEKPFACDICGRKFADRSALARHTKIHTGSQKPFQCRICMRNFSRSDNLSEHIRTHTGEKPFACDICGRKFAKRCNLRCHTKIHLRQKDAAR

SEQ ID NO: 699 - protein, 180 aa, Synthetic construct
  REGION 1..180: note = ZFP AA sequence
AAMAERPFQCRICMRNFSNPANLTRHIRTHTGEKPFACDICGRKFAQNATRTKHTKIHTGSQKPFQCRICMRNFSQSGHLARHIRTHTGEKPFACDICGRKFANRHDRAKHTKIHTGSQKPFQCRICMRNFSRSDHLSEHIRTHTGEKPFACDICGRKFAQRRSRYKHTKIHLRQKDAAR

SEQ ID NO: 700 - protein, 180 aa, Synthetic construct
  REGION 1..180: note = ZFP AA sequence
AAMAERPFQCRICMRNFSQSSDLSRHIRTHTGEKPFACDICGRKFAHRSTRNRHTKIHTGSQKPFQCRICMRNFSRSDVLSAHIRTHTGEKPFACDICGRKFADSRTRKNHTKIHTGSQKPFQCRICMRNFSQSGSLTRHIRTHTGEKPFACDICGRKFADQSGLAHHTKIHLRQKDAAR

SEQ ID NO: 701 - protein, 180 aa, Synthetic construct
  REGION 1..180: note = ZFP AA sequence
AAMAERPFQCRICMRNFSQNPAQWRHIRTHTGEKPFACDICGRKFARSADLSRHTKIHTGSQKPFQCRICMRNFSTSGSLSRHIRTHTGEKPFACDICGRKFARSDHLSRHTKIHTGSQKPFQCRICMRNFSRSDSLLRHIRTHTGEKPFACDICGRKFAQSYDRFQHTKIHLRQKDAAR

SEQ ID NO: 702 - protein, 180 aa, Synthetic construct
  REGION 1..180: note = ZFP AA sequence
AAMAERPFQCRICMRNFSTSGSLSRHIRTHTGEKPFACDICGRKFARSDHLSRHTKIHTGSQKPFQCRICMRNFSRSDSLLRHIRTHTGEKPFACDICGRKFAQSYDRFQHTKIHTGSQKPFQCRICMRNFSRSDNLSTHIRTHTGEKPFACDICGRKFADNRDRIKHTKIHLRQKDAAR

SEQ ID NO: 703 - protein, 180 aa, Synthetic construct
  REGION 1..180: note = ZFP AA sequence
AAMAERPFQCRICMRNFSDRSNLSRHIRTHTGEKPFACDICGRKFALRQNLIMHTKIHTGSQKPFQCRICMRNFSERGTLARHIRTHTGEKPFACDICGRKFARSDALTQHTKIHTGSQKPFQCRICMRNFSRSDSLSQHIRTHTGEKPFACDICGRKFARKADRTRHTKIHLRQKDAAR

SEQ ID NO: 704 - protein, 180 aa, Synthetic construct
  REGION 1..180: note = ZFP AA sequence
AAMAERPFQCRICMRNFSQYCCLTNHIRTHTGEKPFACDICGRKFATSGNLTRHTKIHTGSQKPFQCRICMRNFSQSSDLSRHIRTHTGEKPFACDICGRKFAFRYYLKRHTKIHTGSQKPFQCRICMRNFSQSGDLTRHIRTHTGEKPFACDICGRKFADKGNLTKHTKIHLRQKDAAR

SEQ ID NO: 705 - protein, 180 aa, Synthetic construct
  REGION 1..180: note = ZFP AA sequence
AAMAERPFQCRICMRNFSTSGSLSRHIRTHTGEKPFACDICGRKFARSDNLTTHTKIHTGSQKPFQCRICMRNFSQSGNLARHIRTHTGEKPFACDICGRKFADRTTLMRHTKIHTGSQKPFQCRICMRNFSQSGHLARHIRTHTGEKPFACDICGRKFAQLTHLNSHTKIHLRQKDAAR

SEQ ID NO: 706 - protein, 180 aa, Synthetic construct
  REGION 1..180: note = ZFP AA sequence
AAMAERPFQCRICMRNFSIKHDLHRHIRTHTGEKPFACDICGRKFARSANLTRHTKIHTGSQKPFQCRICMRNFSRSDNLARHIRTHTGEKPFACDICGRKFAQNVSRPRHTKIHTGSQKPFQCRICMRNFSRSDDLSKHIRTHTGEKPFACDICGRKFADSSHRTRHTKIHLRQKDAAR

SEQ ID NO: 707 - protein, 180 aa, Synthetic construct
  REGION 1..180: note = ZFP AA sequence
AAMAERPFQCRICMRNFSRSDNLARHIRTHTGEKPFACDICGRKFAQNVSRPRHTKIHTGSQKPFQCRICMRNFSRSDDLSKHIRTHTGEKPFACDICGRKFADSSHRTRHTKIHTGSQKPFQCRICMRNFSTSSNRKTHIRTHTGEKPFACDICGRKFAAQWTRACHTKIHLRQKDAAR

SEQ ID NO: 708 - protein, 180 aa, Synthetic construct
  REGION 1..180: note = ZFP AA sequence
AAMAERPFQCRICMRNFSRSDDLSKHIRTHTGEKPFACDICGRKFADSSHRTRHTKIHTGSQKPFQCRICMRNFSTSSNRKTHIRTHTGEKPFACDICGRKFAAQWTRACHTKIHTGSQKPFQCRICMRNFSRKQTRTTHIRTHTGEKPFACDICGRKFAHRSSLRRHTKIHLRQKDAAR

SEQ ID NO: 709 - protein, 180 aa, Synthetic construct
  REGION 1..180: note = ZFP AA sequence
AAMAERPFQCRICMRNFSQSAHRKNHIRTHTGEKPFACDICGRKFATSSNRKTHTKIHTGSQKPFQCRICMRNFSRSDNLSAHIRTHTGEKPFACDICGRKFARNNDRKTHTKIHTGSQKPFQCRICMRNFSTSGSLSRHIRTHTGEKPFACDICGRKFAQAGHLAKHTKIHLRQKDAAR

SEQ ID NO: 710 - protein, 180 aa, Synthetic construct
  REGION 1..180: note = ZFP AA sequence
AAMAERPFQCRICMRNFSRSDHLSQHIRTHTGEKPFACDICGRKFAASSTRTKHTKIHTGSQKPFQCRICMRNFSRSDDLTRHIRTHTGEKPFACDICGRKFAQKSNLSSHTKIHTGSQKPFQCRICMRNFSQSANRTTHIRTHTGEKPFACDICGRKFAQNATRTKHTKIHLRQKDAAR

SEQ ID NO: 711 - protein, 180 aa, Synthetic construct
  REGION 1..180: note = ZFP AA sequence
AAMAERPFQCRICMRNFSRSDTLSEHIRTHTGEKPFACDICGRKFARRWTLVGHTKIHTGSQKPFQCRICMRNFSDRSNLSRHIRTHTGEKPFACDICGRKFAQSGDLTRHTKIHTGSQKPFQCRICMRNFSQSSDLSRHIRTHTGEKPFACDICGRKFAYHWYLKKHTKIHLRQKDAAR

SEQ ID NO: 712 - protein, 180 aa, Synthetic construct
  REGION 1..180: note = ZFP AA sequence
AAMAERPFQCRICMRNFSRSANLARHIRTHTGEKPFACDICGRKFARSDNLREHTKIHTGSQKPFQCRICMRNFSRPYTLRLHIRTHTGEKPFACDICGRKFAHRSNLNKHTKIHTGSQKPFQCRICMRNFSQSGSLTRHIRTHTGEKPFACDICGRKFATSANLSRHTKIHLRQKDAAR

SEQ ID NO: 713 - protein, 176 aa, Synthetic construct
  REGION 1..176: note = ZFP AA sequence
LEPGEKPYACPECGKSFSRSDDLVRHQRTHTGEKPYKCPECGKSFSTSGSLVRHQRTHTGEKPYKCPECGKSFSRSDKLVRHQRTHTGEKPYACPECGKSFSRSDELVRHQRTHTGEKPYKCPECGKSFSTSHSLTEHQRTHTGEKPYKCPECGKSFSRADNLTEHQRTHTGKKTS

SEQ ID NO: 714 - protein, 176 aa, Synthetic construct
  REGION 1..176: note = ZFP AA sequence
LEPGEKPYACPECGKSFSERSHLREHQRTHTGEKPYKCPECGKSFSTSHSLTEHQRTHTGEKPYKCPECGKSFSQAGHLASHQRTHTGEKPYACPECGKSFSTSHSLTEHQRTHTGEKPYKCPECGKSFSDPGHLVRHQRTHTGEKPYKCPECGKSFSTSGNLVRHQRTHTGKKTS

SEQ ID NO: 715 - protein, 176 aa, Synthetic construct
  REGION 1..176: note = ZFP AA sequence
LEPGEKPYKCPECGKSFSRADNLTEHQRTHTGEKPYKCPECGKSFSTSGSLVRHQRTHTGEKPYKCPECGKSFSRKDNLKNHQRTHTGEKPYKCPECGKSFSQSSSLVRHQRTHTGEKPYKCPECGKSFSRSDKLVRHQRTHTGEKPYKCPECGKSFSDSGNLRVHQRTHTGKKTS

SEQ ID NO: 716 - protein, 176 aa, Synthetic construct
  REGION 1..176: note = ZFP AA sequence
LEPGEKPYACPECGKSFSQSSSLVRHQRTHTGEKPYKCPECGKSFSQSGDLRRHQRTHTGEKPYKCPECGKSFSRSDERKRHQRTHTGEKPYACPECGKSFSHRTTLTNHQRTHTGEKPYKCPECGKSFSRSDHLTNHQRTHTGEKPYKCPECGKSFSTSGELVRHQRTHTGKKTS

SEQ ID NO: 717 - protein, 176 aa, Synthetic construct
  REGION 1..176: note = ZFP AA sequence
LEPGEKPYACPECGKSFSQSGDLRRHQRTHTGEKPYKCPECGKSFSRSDERKRHQRTHTGEKPYKCPECGKSFSHRTTLTNHQRTHTGEKPYACPECGKSFSRSDHLTNHQRTHTGEKPYKCPECGKSFSTSGELVRHQRTHTGEKPYKCPECGKSFSRSDDLVRHQRTHTGKKTS

SEQ ID NO: 718 - protein, 176 aa, Synthetic construct
  REGION 1..176: note = ZFP AA sequence
LEPGEKPYACPECGKSFSQRAHLERHQRTHTGEKPYKCPECGKSFSQLAHLRAHQRTHTGEKPYKCPECGKSFSDPGHLVRHQRTHTGEKPYACPECGKSFSRRSACRRHQRTHTGEKPYKCPECGKSFSRSDHLTTHQRTHTGEKPYKCPECGKSFSQSSSLVRHQRTHTGKKTS

SEQ ID NO: 719 - protein, 176 aa, Synthetic construct
  REGION 1..176: note = ZFP AA sequence
LEPGEKPYACPECGKSFSQSSNLVRHQRTHTGEKPYKCPECGKSFSRSDDLVRHQRTHTGEKPYKCPECGKSFSTHLDLIRHQRTHTGEKPYACPECGKSFSTSGNLTEHQRTHTGEKPYKCPECGKSFSRRSACRRHQRTHTGEKPYKCPECGKSFSRNDTLTEHQRTHTGKKTS

SEQ ID NO: 720 - protein, 7 aa, Synthetic construct
  REGION 1..7: note = F1
SEADRSR

SEQ ID NO: 721 - protein, 7 aa, Synthetic construct
  REGION 1..7: note = F2
DRSNLTR

SEQ ID NO: 722 - protein, 7 aa, Synthetic construct
  REGION 1..7: note = F3
QSSDLSR

SEQ ID NO: 723 - protein, 7 aa, Synthetic construct
  REGION 1..7: note = F4
YHWYLKK

SEQ ID NO: 724 - protein, 7 aa, Synthetic construct
  REGION 1..7: note = F5
RSDSLSV

SEQ ID NO: 725 - protein, 7 aa, Synthetic construct
  REGION 1..7: note = F6
QNANRKT

SEQ ID NO: 726 - protein, 7 aa, Synthetic construct
  REGION 1..7: note = F1
RSDVLST

SEQ ID NO: 727 - protein, 7 aa, Synthetic construct
  REGION 1..7: note = F2
DNSSRTR

SEQ ID NO: 728 - protein, 7 aa, Synthetic construct
  REGION 1..7: note = F3
RPYTLRL

SEQ ID NO: 729 - protein, 7 aa, Synthetic construct
  REGION 1..7: note = F4
DSSHRTR

SEQ ID NO: 730 - protein, 7 aa, Synthetic construct
  REGION 1..7: note = F5
RSDHLSQ

SEQ ID NO: 731 - protein, 7 aa, Synthetic construct
  REGION 1..7: note = F6
DSSHRTR

SEQ ID NO: 732 - protein, 7 aa, Synthetic construct
  REGION 1..7: note = F1
RSDHLSQ

SEQ ID NO: 733 - protein, 7 aa, Synthetic construct
  REGION 1..7: note = F2
QSADRTK

SEQ ID NO: 734 - protein, 7 aa, Synthetic construct
  REGION 1..7: note = F3
RSDHLSQ

SEQ ID NO: 735 - protein, 7 aa, Synthetic construct
  REGION 1..7: note = F4
RRSDLKR

SEQ ID NO: 736 - protein, 7 aa, Synthetic construct
  REGION 1..7: note = F5
RSDHLSR

SEQ ID NO: 737 - protein, 7 aa, Synthetic construct
  REGION 1..7: note = F6
QSSDLRR

SEQ ID NO: 738 - protein, 7 aa, Synthetic construct
  REGION 1..7: note = F1
RSDNLSE

SEQ ID NO: 739 - protein, 7 aa, Synthetic construct
  REGION 1..7: note = F2
TSSNRKT

SEQ ID NO: 740 - protein, 7 aa, Synthetic construct
  REGION 1..7: note = F3
DRSHLTR

SEQ ID NO: 741 - protein, 7 aa, Synthetic construct
  REGION 1..7: note = F4
RSDALTQ

SEQ ID NO: 742 - protein, 7 aa, Synthetic construct
  REGION 1..7: note = F5
DRSALAR

SEQ ID NO: 743 - protein, 7 aa, Synthetic construct
  REGION 1..7: note = F6
RRFTLSK

SEQ ID NO: 744 - protein, 7 aa, Synthetic construct
  REGION 1..7: note = F1
RSDHLSE

SEQ ID NO: 745 - protein, 7 aa, Synthetic construct
  REGION 1..7: note = F2
QYSGRYY

SEQ ID NO: 746 - protein, 7 aa, Synthetic construct
  REGION 1..7: note = F3
HGQTLNE

SEQ ID NO: 747 - protein, 7 aa, Synthetic construct
  REGION 1..7: note = F4
QSGNLAR

SEQ ID NO: 748 - protein, 7 aa, Synthetic construct
  REGION 1..7: note = F5
RSDSLLR

SEQ ID NO: 749 - protein, 7 aa, Synthetic construct
  REGION 1..7: note = F6
CREYRGK

SEQ ID NO: 750 - protein, 7 aa, Synthetic construct
  REGION 1..7: note = F1
QSANRTT

SEQ ID NO: 751 - protein, 7 aa, Synthetic construct
  REGION 1..7: note = F2
RSANLTR

SEQ ID NO: 752 - protein, 7 aa, Synthetic construct
  REGION 1..7: note = F3
RSDVLSE

SEQ ID NO: 753 - protein, 7 aa, Synthetic construct
  REGION 1..7: note = F4
TSGHLSR

SEQ ID NO: 754 - protein, 7 aa, Synthetic construct
  REGION 1..7: note = F5
QSSDLSR

SEQ ID NO: 755 - protein, 7 aa, Synthetic construct
  REGION 1..7: note = F6
QWSTRKR

SEQ ID NO: 756 - protein, 7 aa, Synthetic construct
  REGION 1..7: note = F1
QSGNLAR

SEQ ID NO: 757 - protein, 7 aa, Synthetic construct
  REGION 1..7: note = F2
ATCCLAH

SEQ ID NO: 758 - protein, 7 aa, Synthetic construct
  REGION 1..7: note = F3
RWQYLPT

SEQ ID NO: 759 - protein, 7 aa, Synthetic construct
  REGION 1..7: note = F4
DRSALAR

SEQ ID NO: 760 - protein, 7 aa, Synthetic construct
  REGION 1..7: note = F5
RSDNLSE

SEQ ID NO: 761 - protein, 7 aa, Synthetic construct
  REGION 1..7: note = F6
KRCNLRC

SEQ ID NO: 762 - protein, 7 aa, Synthetic construct
  REGION 1..7: note = F1
NPANLTR

SEQ ID NO: 763 - protein, 7 aa, Synthetic construct
  REGION 1..7: note = F2
QNATRTK

SEQ ID NO: 764 - protein, 7 aa, Synthetic construct
  REGION 1..7: note = F3
QSGHLAR

SEQ ID NO: 765 - protein, 7 aa, Synthetic construct
  REGION 1..7: note = F4
NRHDRAK

SEQ ID NO: 766 - protein, 7 aa, Synthetic construct
  REGION 1..7: note = F5
RSDHLSE

SEQ ID NO: 767 - protein, 7 aa, Synthetic construct
  REGION 1..7: note = F6
QRRSRYK

SEQ ID NO: 768 - protein, 7 aa, Synthetic construct
  REGION 1..7: note = F1
QSSDLSR

SEQ ID NO: 769 - protein, 7 aa, Synthetic construct
  REGION 1..7: note = F2
HRSTRNR

SEQ ID NO: 770 - protein, 7 aa, Synthetic construct
  REGION 1..7: note = F3
RSDVLSA

SEQ ID NO: 771 - protein, 7 aa, Synthetic construct
  REGION 1..7: note = F4
DSRTRKN

SEQ ID NO: 772 - protein, 7 aa, Synthetic construct
  REGION 1..7: note = F5
QSGSLTR

SEQ ID NO: 773 - protein, 7 aa, Synthetic construct
  REGION 1..7: note = F6
DQSGLAH

SEQ ID NO: 774 - protein, 7 aa, Synthetic construct
  REGION 1..7: note = F1
QNPAQWR

SEQ ID NO: 775 - protein, 7 aa, Synthetic construct
  REGION 1..7: note = F2
RSADLSR

SEQ ID NO: 776 - protein, 7 aa, Synthetic construct
  REGION 1..7: note = F3
TSGSLSR

SEQ ID NO: 777 - protein, 7 aa, Synthetic construct
  REGION 1..7: note = F4
RSDHLSR

SEQ ID NO: 778 - protein, 7 aa, Synthetic construct
  REGION 1..7: note = F5
RSDSLLR

SEQ ID NO: 779 - protein, 7 aa, Synthetic construct
  REGION 1..7: note = F6
QSYDRFQ

SEQ ID NO: 780 - protein, 7 aa, Synthetic construct
  REGION 1..7: note = F1
TSGSLSR

SEQ ID NO: 781 - protein, 7 aa, Synthetic construct
  REGION 1..7: note = F2
RSDHLSR

SEQ ID NO: 782 - protein, 7 aa, Synthetic construct
  REGION 1..7: note = F3
RSDSLLR

SEQ ID NO: 783 - protein, 7 aa, Synthetic construct
  REGION 1..7: note = F4
QSYDRFQ

SEQ ID NO: 784 - protein, 7 aa, Synthetic construct
  REGION 1..7: note = F5
RSDNLST

SEQ ID NO: 785 - protein, 7 aa, Synthetic construct
  REGION 1..7: note = F6
DNRDRIK

SEQ ID NO: 786 - protein, 7 aa, Synthetic construct
  REGION 1..7: note = F1
DRSNLSR

SEQ ID NO: 787 - protein, 7 aa, Synthetic construct
  REGION 1..7: note = F2
LRQNLIM

SEQ ID NO: 788 - protein, 7 aa, Synthetic construct
  REGION 1..7: note = F3
ERGTLAR

SEQ ID NO: 789 - protein, 7 aa, Synthetic construct
  REGION 1..7: note = F4
RSDALTQ

SEQ ID NO: 790 - protein, 7 aa, Synthetic construct
  REGION 1..7: note = F5
RSDSLSQ

SEQ ID NO: 791 - protein, 7 aa, Synthetic construct
  REGION 1..7: note = F6
RKADRTR

SEQ ID NO: 792 - protein, 7 aa, Synthetic construct
  REGION 1..7: note = F1
QYCCLTN

SEQ ID NO: 793 - protein, 7 aa, Synthetic construct
  REGION 1..7: note = F2
TSGNLTR

SEQ ID NO: 794 - protein, 7 aa, Synthetic construct
  REGION 1..7: note = F3
QSSDLSR

SEQ ID NO: 795 - protein, 7 aa, Synthetic construct
  REGION 1..7: note = F4
FRYYLKR

SEQ ID NO: 796 - protein, 7 aa, Synthetic construct
  REGION 1..7: note = F5
QSGDLTR

SEQ ID NO: 797 - protein, 7 aa, Synthetic construct
  REGION 1..7: note = F6
DKGNLTK

SEQ ID NO: 798 - protein, 7 aa, Synthetic construct
  REGION 1..7: note = F1
TSGSLSR

SEQ ID NO: 799 - protein, 7 aa, Synthetic construct
  REGION 1..7: note = F2
RSDNLTT

SEQ ID NO: 800 - protein, 7 aa, Synthetic construct
  REGION 1..7: note = F3
QSGNLAR

SEQ ID NO: 801 - protein, 7 aa, Synthetic construct
  REGION 1..7: note = F4
DRTTLMR

SEQ ID NO: 802 - protein, 7 aa, Synthetic construct
  REGION 1..7: note = F5
QSGHLAR

SEQ ID NO: 803 - protein, 7 aa, Synthetic construct
  REGION 1..7: note = F6
QLTHLNS

SEQ ID NO: 804 - protein, 7 aa, Synthetic construct
  REGION 1..7: note = F1
IKHDLHR

SEQ ID NO: 805 - protein, 7 aa, Synthetic construct
  REGION 1..7: note = F2
RSANLTR

SEQ ID NO: 806 - protein, 7 aa, Synthetic construct
  REGION 1..7: note = F3
RSDNLAR

SEQ ID NO: 807 - protein, 7 aa, Synthetic construct
  REGION 1..7: note = F4
QNVSRPR

SEQ ID NO: 808 - protein, 7 aa, Synthetic construct
  REGION 1..7: note = F5
RSDDLSK

SEQ ID NO: 809 - protein, 7 aa, Synthetic construct
  REGION 1..7: note = F6
DSSHRTR

SEQ ID NO: 810 - protein, 7 aa, Synthetic construct
  REGION 1..7: note = F1
RSDNLAR

SEQ ID NO: 811 - protein, 7 aa, Synthetic construct
  REGION 1..7: note = F2
QNVSRPR

SEQ ID NO: 812 - protein, 7 aa, Synthetic construct
  REGION 1..7: note = F3
RSDDLSK

SEQ ID NO: 813 - protein, 7 aa, Synthetic construct
  REGION 1..7: note = F4
DSSHRTR

SEQ ID NO: 814 - protein, 7 aa, Synthetic construct
  REGION 1..7: note = F5
TSSNRKT

SEQ ID NO: 815 - protein, 7 aa, Synthetic construct
  REGION 1..7: note = F6
AQWTRAC

SEQ ID NO: 816 - protein, 7 aa, Synthetic construct
  REGION 1..7: note = F1
RSDDLSK

SEQ ID NO: 817 - protein, 7 aa, Synthetic construct
  REGION 1..7: note = F2
DSSHRTR

SEQ ID NO: 818 - protein, 7 aa, Synthetic construct
  REGION 1..7: note = F3
TSSNRKT

SEQ ID NO: 819 - protein, 7 aa, Synthetic construct
  REGION 1..7: note = F4
AQWTRAC

SEQ ID NO: 820 - protein, 7 aa, Synthetic construct
  REGION 1..7: note = F5
RKQTRTT

SEQ ID NO: 821 - protein, 7 aa, Synthetic construct
  REGION 1..7: note = F6
HRSSLRR

SEQ ID NO: 822 - protein, 7 aa, Synthetic construct
  REGION 1..7: note = F1
QSAHRKN

SEQ ID NO: 823 - protein, 7 aa, Synthetic construct
  REGION 1..7: note = F2
TSSNRKT

SEQ ID NO: 824 - protein, 7 aa, Synthetic construct
  REGION 1..7: note = F3
RSDNLSA

SEQ ID NO: 825 - protein, 7 aa, Synthetic construct
  REGION 1..7: note = F4
RNNDRKT

SEQ ID NO: 826 - protein, 7 aa, Synthetic construct
  REGION 1..7: note = F5
TSGSLSR

SEQ ID NO: 827 - protein, 7 aa, Synthetic construct
  REGION 1..7: note = F6
QAGHLAK

SEQ ID NO: 828 - protein, 7 aa, Synthetic construct
  REGION 1..7: note = F1
RSDHLSQ

SEQ ID NO: 829 - protein, 7 aa, Synthetic construct
  REGION 1..7: note = F2
ASSTRTK

SEQ ID NO: 830 - protein, 7 aa, Synthetic construct
  REGION 1..7: note = F3
RSDDLTR

SEQ ID NO: 831 - protein, 7 aa, Synthetic construct
  REGION 1..7: note = F4
QKSNLSS

SEQ ID NO: 832 - protein, 7 aa, Synthetic construct
  REGION 1..7: note = F5
QSANRTT

SEQ ID NO: 833 - protein, 7 aa, Synthetic construct
  REGION 1..7: note = F6
QNATRTK

SEQ ID NO: 834 - protein, 7 aa, Synthetic construct
  REGION 1..7: note = F1
RSDTLSE

SEQ ID NO: 835 - protein, 7 aa, Synthetic construct
  REGION 1..7: note = F2
RRWTLVG

SEQ ID NO: 836 - protein, 7 aa, Synthetic construct
  REGION 1..7: note = F3
DRSNLSR

SEQ ID NO: 837 - protein, 7 aa, Synthetic construct
  REGION 1..7: note = F4
QSGDLTR

SEQ ID NO: 838 - protein, 7 aa, Synthetic construct
  REGION 1..7: note = F5
QSSDLSR

SEQ ID NO: 839 - protein, 7 aa, Synthetic construct
  REGION 1..7: note = F6
YHWYLKK

SEQ ID NO: 840 - protein, 7 aa, Synthetic construct
  REGION 1..7: note = F1
RSANLAR

SEQ ID NO: 841 - protein, 7 aa, Synthetic construct
  REGION 1..7: note = F2
RSDNLRE

SEQ ID NO: 842 - protein, 7 aa, Synthetic construct
  REGION 1..7: note = F3
RPYTLRL

SEQ ID NO: 843 - protein, 7 aa, Synthetic construct
  REGION 1..7: note = F4
HRSNLNK

SEQ ID NO: 844 - protein, 7 aa, Synthetic construct
  REGION 1..7: note = F5
QSGSLTR

SEQ ID NO: 845 - protein, 7 aa, Synthetic construct
  REGION 1..7: note = F6
TSANLSR

SEQ ID NO: 846 - protein, 7 aa, Synthetic construct
  REGION 1..7: note = F1
RSDDLVR

SEQ ID NO: 847 - protein, 7 aa, Synthetic construct
  REGION 1..7: note = F2
TSGSLVR

SEQ ID NO: 848 - protein, 7 aa, Synthetic construct
  REGION 1..7: note = F3
RSDKLVR

SEQ ID NO: 849 - protein, 7 aa, Synthetic construct
  REGION 1..7: note = F4
RSDELVR

SEQ ID NO: 850 - protein, 7 aa, Synthetic construct
  REGION 1..7: note = F5
TSHSLTE

SEQ ID NO: 851 - protein, 7 aa, Synthetic construct
  REGION 1..7: note = F6
RADNLTE

SEQ ID NO: 852 - protein, 7 aa, Synthetic construct
  REGION 1..7: note = F1
ERSHLRE

SEQ ID NO: 853 - protein, 7 aa, Synthetic construct
  REGION 1..7: note = F2
TSHSLTE

SEQ ID NO: 854 - protein, 7 aa, Synthetic construct
  REGION 1..7: note = F3
QAGHLAS

SEQ ID NO: 855 - protein, 7 aa, Synthetic construct
  REGION 1..7: note = F4
TSHSLTE

SEQ ID NO: 856 - protein, 7 aa, Synthetic construct
  REGION 1..7: note = F5
DPGHLVR

SEQ ID NO: 857 - protein, 7 aa, Synthetic construct
  REGION 1..7: note = F6
TSGNLVR

SEQ ID NO: 858 - protein, 7 aa, Synthetic construct
  REGION 1..7: note = F1
RADNLTE

SEQ ID NO: 859 - protein, 7 aa, Synthetic construct
  REGION 1..7: note = F2
TSGSLVR

SEQ ID NO: 860 - protein, 7 aa, Synthetic construct
  REGION 1..7: note = F3
RKDNLKN

SEQ ID NO: 861 - protein, 7 aa, Synthetic construct
  REGION 1..7: note = F4
QSSSLVR

SEQ ID NO: 862 - protein, 7 aa, Synthetic construct
  REGION 1..7: note = F5
RSDKLVR

SEQ ID NO: 863 - protein, 7 aa, Synthetic construct
  REGION 1..7: note = F6
DSGNLRV

SEQ ID NO: 864 - protein, 7 aa, Synthetic construct
  REGION 1..7: note = F1
QSSSLVR

SEQ ID NO: 865 - protein, 7 aa, Synthetic construct
  REGION 1..7: note = F2
QSGDLRR

SEQ ID NO: 866 - protein, 7 aa, Synthetic construct
  REGION 1..7: note = F3
RSDERKR

SEQ ID NO: 867 - protein, 7 aa, Synthetic construct
  REGION 1..7: note = F4
HRTTLTN

SEQ ID NO: 868 - protein, 7 aa, Synthetic construct
  REGION 1..7: note = F5
RSDHLTN

SEQ ID NO: 869 - protein, 7 aa, Synthetic construct
  REGION 1..7: note = F6
TSGELVR

SEQ ID NO: 870 - protein, 7 aa, Synthetic construct
  REGION 1..7: note = F1
QSGDLRR

SEQ ID NO: 871 - protein, 7 aa, Synthetic construct
  REGION 1..7: note = F2
RSDERKR

SEQ ID NO: 872 - protein, 7 aa, Synthetic construct
  REGION 1..7: note = F3
HRTTLTN

SEQ ID NO: 873 - protein, 7 aa, Synthetic construct
  REGION 1..7: note = F4
RSDHLTN

SEQ ID NO: 874 - protein, 7 aa, Synthetic construct
  REGION 1..7: note = F5
TSGELVR

SEQ ID NO: 875 - protein, 7 aa, Synthetic construct
  REGION 1..7: note = F6
RSDDLVR

SEQ ID NO: 876 - protein, 7 aa, Synthetic construct
  REGION 1..7: note = F1
QRAHLER

SEQ ID NO: 877 - protein, 7 aa, Synthetic construct
  REGION 1..7: note = F2
QLAHLRA

SEQ ID NO: 878 - protein, 7 aa, Synthetic construct
  REGION 1..7: note = F3
DPGHLVR

SEQ ID NO: 879 - protein, 7 aa, Synthetic construct
  REGION 1..7: note = F4
RRSACRR

SEQ ID NO: 880 - protein, 7 aa, Synthetic construct
  REGION 1..7: note = F5
RSDHLTT

SEQ ID NO: 881 - protein, 7 aa, Synthetic construct
  REGION 1..7: note = F6
QSSSLVR

SEQ ID NO: 882 - protein, 7 aa, Synthetic construct
  REGION 1..7: note = F1
QSSNLVR

SEQ ID NO: 883 - protein, 7 aa, Synthetic construct
  REGION 1..7: note = F2
RSDDLVR

SEQ ID NO: 884 - protein, 7 aa, Synthetic construct
  REGION 1..7: note = F3
THLDLIR

SEQ ID NO: 885 - protein, 7 aa, Synthetic construct
  REGION 1..7: note = F4
TSGNLTE

SEQ ID NO: 886 - protein, 7 aa, Synthetic construct
  REGION 1..7: note = F5
RRSACRR

SEQ ID NO: 887 - protein, 7 aa, Synthetic construct
  REGION 1..7: note = F6
RNDTLTE

SEQ ID NO: 888 - DNA, 540 bp, Synthetic construct
  misc_feature 1..540: note = ZFP DNA sequence
  source 1..540: mol_type = other DNA
gctgctatggcagagcggccatttcagtgtcgaatttgcatgcgaaatttctctagcgaagcggatcgaagtagacatatccggacccatacgggtgagaaaccgttcgcgtgtgatatatgcggtcgcaaattcgcagaccgctccaacctgacaaggcacacaaaaattcatactggaagccagaaaccgtttcagtgccggatttgtatgcgcaatttctctcaatcctccgatctctcccgccacatcaggactcataccggggagaaaccctttgcttgtgacatttgtggcagaaagtttgcctatcactggtaccttaagaagcacaccaagatccatactggctctcaaaagcctttccaatgccgaatatgtatgcgaaacttttctaggtctgactccctctctgtacatatccgcactcacacgggtgaaaaaccatttgcctgtgacatatgtggcagaaaatttgctcaaaatgcgaaccgaaaaacgcatacgaaaatccatttgcgacaaaaagatgcagctcgg

SEQ ID NO: 889 - DNA, 540 bp, Synthetic construct
  misc_feature 1..540: note = ZFP DNA sequence
  source 1..540: mol_type = other DNA
gcggcaatggcagaacgcccgtttcagtgtagaatctgcatgcgcaatttctccagaagtgacgtactcagcacgcatatcagaacacatactggtgaaaaaccgtttgcttgtgatatctgtggtaagaaattcgcggataactcctcaaggacgcggcatacgaagatccacactggttctcaaaagccgttccagtgccggatatgcatgcggaactttagtcggccatatacgcttcgacttcatattaggactcacaccggcgaaaagccgttcgcctgtgacatttgcgggagaaaattcgctgactctagtcaccgcacgaggcacactaaaatacatactggttcacaaaaaccattccagtgccgaatttgcatgcgaaatttttcccgaagtgaccatctctcacagcacatccgcacccatacaggggagaagcccttcgcttgtgatatatgcggacgcaagttcgcggacagctcacaccggacccgccatacaaagatccacttgagacagaaagatgcagcgcgg

SEQ ID NO: 890 - DNA, 540 bp, Synthetic construct
  misc_feature 1..540: note = ZFP DNA sequence
  source 1..540: mol_type = other DNA
gccgcaatggccgaaagaccatttcagtgcaggatatgtatgcgcaacttctctcgcagtgaccacctgagtcaacatatcaggacacacacgggtgaaaagccttttgcatgcgatatttgtggtcgaaaatttgctcagtctgcggaccgaaccaagcacactaaaattcataccggctcacagaaaccgtttcaatgccgcatctgtatgaggaatttctctagatcagaccacttgtcccaacacatccggactcatactggagaaaagccgtttgcatgtgacatttgtggcaggaagtttgctagaaggtctgaccttaaaaggcacacaaaaattcatacgggttcccagaaaccatttcagtgccggatatgcatgcggaacttttcacgaagcgaccacctctcccgacatattcgaacgcacactggtgagaagccgtttgcttgcgacatttgcggacgcaagttcgctcagagctccgacttgaggaggcataccaagattcatctccggcagaaagatgccgcgcgg

SEQ ID NO: 891 - DNA, 540 bp, Synthetic construct
  misc_feature 1..540: note = ZFP DNA sequence
  source 1..540: mol_type = other DNA
gccgcgatggctgagagaccatttcagtgtcgaatctgcatgagaaatttttcaaggagtgacaatctgtctgagcacatacgaacacatactggggaaaaaccctttgcatgtgacatttgtggaagaaagtttgctaccagctcaaatcgcaaaacacatacaaagatacataccggctcccaaaagccattccagtgccgcatctgcatgaggaacttttccgatcgctcacatcttacccgccacataagaactcacacaggcgaaaagccctttgcctgcgatatatgcggacggaagttcgcccgctccgacgctttgacccagcataccaaaatccatactgggtctcaaaagccatttcagtgccgaatctgtatgaggaatttctccgacaggtcagcattggcacggcatatccgcacccataccggtgagaagccttttgcttgcgatatctgtggacgaaaatttgcccggaggttcactctctccaaacacacaaagatacatctgcgccaaaaggatgcagcccgg

SEQ ID NO: 892 - DNA, 540 bp, Synthetic construct
  misc_feature 1..540: note = ZFP DNA sequence
  source 1..540: mol_type = other DNA
gccgcaatggctgagcgcccgttccagtgcagaatatgcatgcggaatttttctaggtcagatcatttgtctgagcatattcgcacacacacgggagagaagccctttgcttgcgatatatgtggaaggaaattcgcgcaatacagtgggcgctactaccatacaaagatccatacgggctcccagaagcccttccaatgtcgaatatgtatgaggaattttagtcacggacaaacattgaatgaacatatacgcactcacactggtgaaaaaccatttgcgtgcgatatttgcggaaggaagtttgctcagtctgggaatttggcgcgacacaccaagatccacacaggatcccagaaaccatttcagtgcagaatttgtatgagaaactttagccgcagtgacagtctcttgaggcacatacggactcatactggggagaaaccattcgcctgcgatatttgtggacgaaagttcgcctgtcgcgagtacagaggcaagcacactaagatacatcttaggcaaaaggacgctgcacgg

SEQ ID NO: 893 - DNA, 540 bp, Synthetic construct
  misc_feature 1..540: note = ZFP DNA sequence
  source 1..540: mol_type = other DNA
gccgcgatggctgagaggccttttcaatgtcgaatctgtatgaggaacttctctcaatctgctaatcgcacgacgcacattcgaacgcataccggtgagaagccattcgcgtgcgatatctgcggacggaaattcgcgaggtcagctaatcttacacggcacacgaagatccacacagggtcacagaaaccttttcagtgtcgcatttgcatgaggaatttctcccgatctgacgtccttagcgaacatatacgaactcacacgggcgagaagccatttgcgtgcgatatatgcgggaggaagtttgccacctctggacatctgagtcgacataccaaaattcataccggtagtcagaagccgttccaatgcagaatatgtatgcgaaatttctctcaaagctcagacttgtctaggcacataagaacgcacacgggtgaaaaacctttcgcgtgtgatatctgcggcagaaagttcgcacaatggtccacccgaaagcggcatacgaagattcacctcagacagaaagacgctgcccgg

SEQ ID NO: 894 - DNA, 540 bp, Synthetic construct
  misc_feature 1..540: note = ZFP DNA sequence
  source 1..540: mol_type = other DNA
gcggcgatggcagaacgcccgttccaatgcagaatatgtatgagaaacttctcccagagcggaaatctggcacgccacatccggacacacacgggagagaagccatttgcttgtgacatttgtggtcgcaaatttgccgccacctgttgtctggcacatcatactaagatacatacggggtcacagaaaccattccaatgtaggatctgcatgcggaatttttctcggtggcagtatttgcctacgcatattagaacccacgccggtgagaaaccgtttgcatgtgacatctgcggacgaaagtttgccgatagatctgcgcttgctaggcatactaaaatccacacggggtcccagaagccttttcagtgtcggatatgtatgaggaacttcagtcgatcagacaaccttagcgagcatattcggacgcatactggagaaaaaccttttgcttgtgatatatgcggtaggaagttcgccaaacggtgtaaccttcgctgtcacaccaaaatacatcttcgccagaaagatgcggcccgg

SEQ ID NO: 895 - DNA, 540 bp, Synthetic construct
  misc_feature 1..540: note = ZFP DNA sequence
  source 1..540: mol_type = other DNA
gccgctatggctgaaagaccattccagtgcagaatatgtatgaggaatttttctaatcccgcgaaccttacgcgccatatcaggacgcacacgggcgaaaagcccttcgcctgcgacatttgtgggagaaagtttgctcaaaacgcgaccaggacaaagcacacgaaaattcacactggtagccagaagccgttccagtgtaggatctgtatgcgcaatttctctcagtccgggcacctcgcgcgacacataagaactcatacgggggagaagccgtttgcatgtgacatctgcggccgcaagtttgcgaataggcatgacagggcaaaacatacgaagatccatacaggttctcaaaaacctttccaatgtcgaatatgcatgcgcaactttagtcggtcagaccacctttctgaacacatcaggacacacactggcgaaaagccgttcgcatgtgacatttgcggcagaaagttcgcacaaagacggtcccgctataagcacaccaaaattcaccttaggcaaaaggatgcagctcgg

SEQ ID NO: 896 - DNA, 540 bp, Synthetic construct
  misc_feature 1..540: note = ZFP DNA sequence
  source 1..540: mol_type = other DNA
gcggcaatggcagaacgacccttccaatgccgcatatgtatgcgaaacttcagccagagctcagatctttccagacacatcaggactcacactggcgaaaaaccatttgcatgcgatatatgcgggagaaaattcgcgcaccgcagtacgcgaaacaggcatacaaagatacatactggcagtcaaaagccatttcaatgtcgaatatgcatgaggaactttagtcgatctgacgtgctgagcgctcacatacggacccataccggagagaaaccattcgcttgtgacatctgtggtaggaagttcgcggattcccggacccgcaaaaatcatactaaaattcacactgggtctcagaagccctttcagtgtaggatatgtatgcgcaattttagccagagtggttcattgactcggcatatcagaacacatactggagagaaacctttcgcgtgtgatatttgcggtcgaaagttcgcagatcagagtggacttgcgcaccatactaagatccacctgagacagaaggacgctgcgcgg

SEQ ID NO: 897 - DNA, 540 bp, Synthetic construct
  misc_feature 1..540: note = ZFP DNA sequence
  source 1..540: mol_type = other DNA
gctgccatggcggagcgccctttccagtgtaggatatgtatgcgcaacttcagtcagaacccagcccagtggcggcacatacggacgcatactggagaaaagccatttgcatgtgatatctgcgggcgaaaattcgcgcggtcagcagatttgagccggcatacgaagatccatacaggttcacaaaagccatttcaatgtcggatatgtatgcggaacttcagcacgtccggctcattgtcaagacatatacgaactcataccggagagaaacccttcgcgtgcgacatttgcggtcggaagttcgcgcgatccgaccatctgtcacgacatacgaaaatacacactggctctcaaaagccgtttcagtgcagaatttgcatgagaaattttagcaggagcgactcactccttcggcatatacgaacacacactggtgagaagccatttgcctgtgatatttgtggacgaaagtttgcgcaatcttacgataggtttcagcatacaaaaatccaccttcggcaaaaggacgcggcacgg

SEQ ID NO: 898 - DNA, 540 bp, Synthetic construct
  misc_feature 1..540: note = ZFP DNA sequence
  source 1..540: mol_type = other DNA
gctgccatggctgaacgaccgtttcaatgtcgaatttgcatgcgcaacttctccacgtccgggtctctcagtagacacatcagaacgcatactggtgaaaaaccattcgcttgtgacatatgcggccgaaaattcgcgcggagcgaccacctgtcacggcataccaaaattcacaccgggagtcaaaaaccgttccagtgtaggatatgtatgcgcaacttcagccggtctgacagtctgcttcgacatattcggacgcacactggtgaaaagccgtttgcgtgcgacatttgtggtcgaaagttcgctcaatcttatgataggtttcaacacaccaaaatacatacgggctcccagaagccgttccagtgcagaatatgcatgagaaatttctctcgcagtgacaatttgtccacccatattcgaacgcacaccggcgagaaacccttcgcctgcgatatttgcggtcgcaagttcgcagacaacagggataggataaaacatacgaagatccatctgaggcaaaaagacgccgcccgg

SEQ ID NO: 899 - DNA, 540 bp, Synthetic construct
  misc_feature 1..540: note = ZFP DNA sequence
  source 1..540: mol_type = other DNA
gcagccatggcagagcggccattccagtgcagaatctgcatgcggaacttttccgataggtccaatctgtcacgccatattaggacacacacgggtgaaaaaccgttcgcgtgtgacatatgcggtcgcaaattcgccctgagacagaacctgattatgcacacaaaaatacatacgggaagccagaaaccgttccagtgtcggatatgcatgaggaacttcagtgagagggggactttggcgaggcacatcaggactcacactggggagaagccctttgcatgtgatatctgtggccgaaaatttgctcgatcagatgctctcacccaacatacaaagatccatactggctctcaaaaaccgtttcaatgtagaatttgtatgcgcaacttctctcggtcagatagcctgtcccagcatatccgaactcatacaggtgagaaacccttcgcatgcgacatctgtgggcgaaaatttgctagaaaagcagaccggacccgacacacaaagattcatctgcgacaaaaagacgccgcccgg

SEQ ID NO: 900 - DNA, 540 bp, Synthetic construct
  misc_feature 1..540: note = ZFP DNA sequence
  source 1..540: mol_type = other DNA
gcggccatggctgagaggccttttcaatgtagaatatgtatgcgaaatttttcacagtactgttgtctcacgaaccacataaggactcatacaggggagaaaccatttgcctgtgacatttgcggtcgcaaatttgctacttctggaaacctgactcggcacactaagattcacacagggtcccagaagcccttccagtgtcgcatttgcatgaggaattttagtcaaagctctgacttgtcaaggcatattcgcacgcacacgggcgaaaagccgttcgcttgcgacatatgcgggcggaaatttgccttccgctattatttgaagagacacaccaagatacatacgggctctcagaagccctttcagtgtaggatttgcatgcgcaatttttcacaatctggtgatctcacgcgacacatccggactcacacaggtgaaaagcctttcgcgtgcgacatttgcggccggaagtttgctgacaagggcaacctcacaaagcatacgaagattcacttgaggcagaaagatgctgctcgg

SEQ ID NO: 901 - DNA, 540 bp, Synthetic construct
  misc_feature 1..540: note = ZFP DNA sequence
  source 1..540: mol_type = other DNA
gccgccatggccgaacgaccattccagtgcaggatatgtatgcgcaatttttcaaccagtggttcattgtcacgacatattagaacacacaccggtgagaaaccctttgcgtgtgacatctgtgggaggaaattcgcaagatctgacaaccttacgacacatacaaagattcacacaggctctcaaaagcccttccagtgccgaatttgcatgcgaaacttttcccagtctggtaatctcgctcgacatatcagaacccacacgggggaaaaaccattcgcttgtgatatttgcggacgaaagttcgccgacagaaccacactcatgagacacactaaaatccatactggtagtcagaagccgtttcagtgtagaatctgcatgaggaacttttcccagtcaggccaccttgcaagacatatacgaactcacactggagaaaagccgttcgcctgtgacatttgtgggcgcaagttcgcgcaactcacccatctgaatagccatacgaagattcacttgagacagaaagatgcggctcgg

SEQ ID NO: 902 - DNA, 540 bp, Synthetic construct
  misc_feature 1..540: note = ZFP DNA sequence
  source 1..540: mol_type = other DNA
gcagctatggctgaacgcccattccagtgtcggatctgcatgcgcaacttttctataaaacacgatcttcaccgacacattcggacacatactggggagaagccctttgcgtgtgacatctgtggccgaaagttcgctagatccgcaaacttgactcggcatacgaaaattcacactggaagccagaaacctttccaatgtcgaatctgtatgaggaactttagcagaagtgataatctcgccaggcatatccgaacgcacacaggcgagaagccattcgcatgtgatatttgtggtagaaagttcgcccaaaatgtctctcgcccacgccatactaagatccacacgggctcccagaagccgttccaatgccgcatttgcatgcgaaacttttccagatcagacgatctgagcaagcatattaggacgcatacaggggagaagccttttgcttgcgacatttgcggccggaaatttgctgactcaagtcacagaacacggcataccaagatacaccttcgacaaaaagatgccgcacgg

SEQ ID NO: 903 - DNA, 540 bp, Synthetic construct
  misc_feature 1..540: note = ZFP DNA sequence
  source 1..540: mol_type = other DNA
gcggccatggcggaacgaccctttcagtgccgaatttgcatgaggaacttttcacgatctgataacctggcgaggcacatccgaacacatacgggcgagaagccattcgcatgtgatatctgcgggcgaaagttcgcccaaaatgtcagtagaccgcgacatactaaaatacacactggctcacagaagccgttccaatgccgcatctgtatgcgcaatttttcccgaagcgacgatctgtctaaacatattcggacgcacactggggaaaagcctttcgcttgtgacatctgtgggaggaagttcgctgacagctctcataggacacgccatactaagattcataccggaagccagaagcctttccagtgtcggatttgcatgagaaactttagcacttctagcaacagaaagacacatatacgaacccatacgggtgagaaaccgttcgcatgcgatatctgtgggcgaaaatttgcagcccaatggaccagagcttgccataccaagatacaccttcggcagaaggacgctgcacgg

SEQ ID NO: 904 - DNA, 540 bp, Synthetic construct
  misc_feature 1..540: note = ZFP DNA sequence
  source 1..540: mol_type = other DNA
gctgcgatggcagaacgaccttttcaatgccgaatttgtatgaggaacttttcccggtcagacgacctttccaagcacatcagaactcataccggagaaaaaccgttcgcctgtgacatttgtggacggaagtttgctgactcctctcacaggactcgccacactaagatacacaccggaagtcagaagcccttccaatgtaggatatgcatgagaaacttcagtacgtcatcaaaccgaaaaacgcatatcaggacacataccggcgaaaagccgtttgcatgtgatatctgcggcaggaaatttgcagctcagtggacacgggcatgtcacacaaaaatccataccggtagtcaaaaaccgtttcagtgtcgaatctgcatgaggaactttagccggaagcagacgagaaccacgcatataagaactcacacaggtgagaaaccctttgcgtgcgatatctgcggtcgcaaatttgctcaccgatcctccctgaggcgacatactaaaatacatctgcgacagaaagacgcggctcgg

SEQ ID NO: 905 - DNA, 540 bp, Synthetic construct
  misc_feature 1..540: note = ZFP DNA sequence
  source 1..540: mol_type = other DNA
gccgccatggcagaacggccttttcagtgtcggatctgcatgagaaactttagtcagagtgcccatcgcaagaatcatattcgaactcataccggtgaaaaaccgttcgcgtgcgacatctgtggtcgaaagtttgccacatcatccaatagaaaaacgcatactaagattcataccggtagccagaaaccattccaatgtagaatctgcatgcgaaatttcagcaggagtgacaatttgtccgcacatatacggacacacacgggcgaaaaaccctttgcttgcgatatatgcggtagaaagttcgctaggaacaacgaccgaaaaacacacacgaagattcatacaggtagtcagaagccatttcaatgtcggatctgtatgcgaaatttctctacttctggcagcctgtcccggcacatcagaacacataccggtgagaagccatttgcatgtgacatatgtgggagaaaatttgcccaggcgggtcaccttgcgaagcatacaaagatccacctccgccagaaggacgccgcacgg

SEQ ID NO: 906 - DNA, 540 bp, Synthetic construct
  misc_feature 1..540: note = ZFP DNA sequence
  source 1..540: mol_type = other DNA
gcggctatggcagagcggccattccaatgtaggatatgtatgaggaacttctcccggagcgatcacctgtcccaacacatccgcacgcatacgggtgagaagccgtttgcttgtgatatctgcggaagaaaatttgcagcatccagtacacgcacaaagcatacgaagattcatacgggatcccaaaagccctttcaatgcaggatttgtatgaggaacttcagtcggtccgacgatctgacacgacatattagaactcatactggagagaagccattcgcatgtgacatctgcggtaggaagttcgcgcagaaatctaacctgtcatctcacaccaagatacatacaggctcacagaagccgtttcaatgccgcatctgcatgaggaatttcagccagtccgcaaacagaactacgcatattcggacgcataccggcgagaagccgtttgcctgcgacatttgcgggaggaaattcgcacagaacgcgaccagaaccaaacacaccaaaatccatcttaggcaaaaggatgcggcccgg

SEQ ID NO: 907 - DNA, 540 bp, Synthetic construct
  misc_feature 1..540: note = ZFP DNA sequence
  source 1..540: mol_type = other DNA
gcggccatggcagaacgaccctttcagtgccgaatttgcatgcggaactttagtcgcagtgacaccctgagcgagcatattcgcacgcatacgggagagaagccatttgcatgcgacatctgcggtagaaagtttgcgaggcgctggacgttggtaggccacacgaaaatccatacaggctcccagaaacccttccagtgcagaatttgtatgcgcaattttagtgacagaagtaacttgtcccgacatataaggacgcacaccggcgaaaaaccgtttgcctgtgatatctgtggtcggaaattcgcccagtccggtgacttgacacggcataccaaaatacacactggaagccaaaagccttttcagtgtcgcatatgtatgcgcaacttcagccagagtagtgacctttcacggcatatacggacgcatacgggtgagaaacccttcgcctgtgacatttgcgggcgaaagtttgcatatcattggtacctgaaaaaacatacgaaaatacatttgagacaaaaagatgcagcccgg

SEQ ID NO: 908 - DNA, 540 bp, Synthetic construct
  misc_feature 1..540: note = ZFP DNA sequence
  source 1..540: mol_type = other DNA
gctgccatggccgagcgcccgtttcaatgcagaatatgtatgaggaacttctctagaagcgccaatcttgcgcgacacattagaactcacacaggcgagaaacctttcgcctgtgacatctgcggcagaaaatttgcgcgaagtgataacttgcgcgagcacacaaaaatccataccggttcccaaaagccctttcaatgtaggatttgcatgaggaacttttcaagaccatacacgctgagactccacattcgcacgcatacgggagaaaaaccatttgcttgtgacatatgcggccgaaagtttgcacaccgatccaacttgaataagcataccaaaatccatacggggtctcagaaacccttccagtgtcggatttgtatgcgaaacttctctcagagtggttctcttacgcgccacattagaacccacacgggggaaaagccattcgcgtgcgatatctgtggccggaaatttgctacttccgcaaatctttctcgacatacaaagatacatcttagacagaaggatgcggcacgg

SEQ ID NO: 909 - DNA, 528 bp, Synthetic construct
  misc_feature 1..528: note = ZFP DNA sequence
  source 1..528: mol_type = other DNA
ttggagcccggtgaaaaaccatatgcctgtccagagtgtggaaaaagttttagcagaagcgacgacctggttaggcatcaacgaactcacacaggggaaaagccgtacaaatgtcctgaatgcggaaagtcattctccacttcaggtagcctcgtgcgacatcagcgcacacatactggcgaaaaaccttataagtgtccggaatgcggcaagagtttttctagaagtgataagctcgtgcgacaccagcggacgcacacgggtgagaagccctacgcctgcccagagtgcggaaagtcctttagtaggtctgacgaactggtccggcaccaacgaacccatacaggggagaaaccctacaaatgtccagagtgcgggaaatcattttcaacgtctcacagcttgacggaacatcagaggacccatacaggcgaaaagccttacaaatgtccggagtgcggaaagtctttcagccgggctgataatctcacggagcaccaaagaacccacacgggtaagaaaacctct

SEQ ID NO: 910 - DNA, 528 bp, Synthetic construct
  misc_feature 1..528: note = ZFP DNA sequence
  source 1..528: mol_type = other DNA
ttggagccgggagaaaagccatatgcctgtccggaatgcggcaaaagcttttcagaacggtcccatttgcgggaacatcagcgcacccataccggagaaaagccttacaagtgtcccgagtgtggtaagagcttttcaacttcccacagtctcactgaacatcagcgaactcacacaggcgaaaaaccatacaaatgcccggagtgtggaaagagtttttctcaagctgggcacttggccagccaccaaaggactcatacgggcgagaaaccgtatgcctgtccagaatgcgggaaatcattttctactagtcattcccttacggaacatcagagaacgcacaccggggagaagccatacaagtgtccggagtgcggaaaatcattctccgacccgggtcatctcgttcgccatcagaggactcatactggagagaaaccgtataaatgtcctgaatgcgggaagagcttttctacatctgggaaccttgtgcggcaccagcgaacccacacggggaaaaagacttct

SEQ ID NO: 911 - DNA, 528 bp, Synthetic construct
  misc_feature 1..528: note = ZFP DNA sequence
  source 1..528: mol_type = other DNA
ctggaaccgggtgaaaaaccctacgcttgtcccgagtgtgggaaatcattctcaagggcagataatcttacggaacatcagcgcacacacaccggggaaaaaccctataagtgccctgagtgtggtaaatcattctctacgtcagggtcattggtgcgccatcagaggacccatacaggcgaaaaaccgtataagtgccccgaatgcggtaaaagcttcagcagaaaagataacttgaaaaatcaccaacgcactcacacgggagaaaaaccgtacgcatgcccggagtgcggcaagagtttcagtcagagtagctcacttgttcgccaccaaagaacccacacaggcgaaaagccctacaagtgtcctgaatgtggaaagagtttcagtcgaagtgataaattggttaggcaccaaagaacacacactggagagaaaccgtacaagtgtccagaatgtggcaagtctttttctgattctggaaatttgcgcgtccatcaaaggactcatactgggaaaaagacgtcc

SEQ ID NO: 912 - DNA, 528 bp, Synthetic construct
  misc_feature 1..528: note = ZFP DNA sequence
  source 1..528: mol_type = other DNA
ctcgaaccaggggaaaagccatacgcttgccccgagtgtggaaaatctttctctcagtcaagctcccttgtcagacaccagagaacccatacgggtgagaaaccatacaagtgcccagagtgcggcaaaagcttcagtcagagtggcgatctgcgccggcatcaaagaactcacactggagaaaagccctataagtgccccgaatgtggaaagagtttttccaggagtgacgaaagaaagagacaccagcggactcacaccggcgagaaaccatacgcatgccccgagtgcggaaaaagtttttcccaccgcacaacccttaccaatcatcaacgcacgcacacaggggagaaaccctacaagtgcccggagtgtggcaagtcattcagccgaagtgaccacctcactaaccaccaaaggactcacacaggagaaaaaccctacaaatgtccggagtgcggaaaatctttttccacgtccggtgagctggtccgccatcaacgaacccatactggtaaaaaaactagc

SEQ ID NO: 913 - DNA, 528 bp, Synthetic construct
  misc_feature 1..528: note = ZFP DNA sequence
  source 1..528: mol_type = other DNA
ctggaacccggggagaagccgtacgcttgcccagagtgcggaaagagcttctctcagagcggagaccttagacgccaccagcgaacccacaccggcgaaaaaccgtataaatgcccggaatgcggcaagagttttagtcggtccgatgagcgaaagaggcatcaacgaacccatacgggagagaaaccctacaagtgccctgagtgtggtaagtcattttcccacagaacgacgttgacgaatcaccagagaacccatacgggtgagaaaccttacgcttgcccggagtgcggcaaaagcttcagccggagtgatcacttgaccaatcatcagaggacacacacgggtgagaagccctacaaatgtcccgaatgcggcaagtctttctcaacgtcaggcgaactcgtccggcaccagcgaacacatacgggagaaaagccgtacaaatgtccggaatgcggaaagtcattttcacggtcagatgacttggtgcgacaccagcgcactcacacaggcaagaagacctca

SEQ ID NO: 914 - DNA, 528 bp, Synthetic construct
  misc_feature 1..528: note = ZFP DNA sequence
  source 1..528: mol_type = other DNA
ctggagcctggtgagaagccgtatgcatgtcctgagtgtgggaagtcatttagtcagagggcccacttggaacgacaccaaaggacccacactggtgaaaaaccctacaaatgcccagagtgtggtaagtctttttcacagctggcccacctgagagcacaccagcgaactcatacgggcgagaaaccatacaagtgtccagagtgcggaaagtcattctcagatcccggccacttggtgcgacatcagagaacgcacacaggggagaagccttatgcttgcccggaatgcgggaagtctttcagccgccgaagtgcttgtcgaaggcaccaacggacccataccggtgagaaaccatataagtgcccagagtgtggaaagagttttagtcgatccgatcacctgactacgcaccagcggacgcacacaggagagaaaccgtataagtgccctgaatgcggtaagagcttctctcaatcaagctcactggttaggcaccaacgcactcataccggcaagaagacgtca

SEQ ID NO: 915 - DNA, 528 bp, Synthetic construct
  misc_feature 1..528: note = ZFP DNA sequence
  source 1..528: mol_type = other DNA
cttgagccgggggaaaagccttatgcttgcccagagtgtggcaagagcttctcccaaagttcaaacctcgtccgacaccaaaggactcacacgggcgaaaaaccgtataaatgccccgagtgcggaaagtcattttccaggtccgacgatctggtccgccaccagcgcactcatacgggggaaaagccctataagtgccctgagtgcggcaagagcttctcaactcacctggatctcattcgccatcaacgcacacatacaggggagaagccttacgcttgtccagagtgcggcaagtctttcagtacgagcggaaacctgacggaacaccagcgaacccacacgggcgagaagccatataaatgtcccgaatgtggaaaatcattctctcgccgatctgcgtgccgccggcatcagaggacacataccggagaaaagccgtacaaatgccccgagtgtggaaaatcctttagcagaaatgatacacttaccgagcatcagaggacgcacactggaaaaaagacatct

SEQ ID NO: 916 - DNA, 825 bp, Synthetic construct
  misc_feature 1..825: note = 3xFLAG-SV40 NLS--ZFP-SV40-NLS-KRAB (DNA Sequence)
  source 1..825: mol_type = other DNA
atggcaccgaagaaaaaacgcaaagttggtcgagtacccgctgctatggcagagcggccatttcagtgtcgaatttgcatgcgaaatttctctagcgaagcggatcgaagtagacatatccggacccatacgggtgagaaaccgttcgcgtgtgatatatgcggtcgcaaattcgcagaccgctccaacctgacaaggcacacaaaaattcatactggaagccagaaaccgtttcagtgccggatttgtatgcgcaatttctctcaatcctccgatctctcccgccacatcaggactcataccggggagaaaccctttgcttgtgacatttgtggcagaaagtttgcctatcactggtaccttaagaagcacaccaagatccatactggctctcaaaagcctttccaatgccgaatatgtatgcgaaacttttctaggtctgactccctctctgtacatatccgcactcacacgggtgaaaaaccatttgcctgtgacatatgtggcagaaaatttgctcaaaatgcgaaccgaaaaacgcatacgaaaatccatttgcgacaaaaagatgcagctcggggctccggaccgaaaaaaaagagaaaggtaaacggcgggggaggatcacggaccctggttacatttaaggacgtttttgtagacttcacgagggaggaatggaagctgttggacaccgcccagcaaatcgtgtatcgaaatgtaatgttggaaaattataaaaatctggtttccctcggctaccaattgacaaaaccagacgtcatcctcagactggaaaaaggggaagaaccttggcttgtctga

SEQ ID NO: 917 - DNA, 825 bp, Synthetic construct
  misc_feature 1..825: note = 3xFLAG-SV40 NLS--ZFP-SV40-NLS-KRAB (DNA Sequence)
  source 1..825: mol_type = other DNA
atggcaccgaagaaaaaacgcaaagttggtcgagtacccgcggcaatggcagaacgcccgtttcagtgtagaatctgcatgcgcaatttctccagaagtgacgtactcagcacgcatatcagaacacatactggtgaaaaaccgtttgcttgtgatatctgtggtaagaaattcgcggataactcctcaaggacgcggcatacgaagatccacactggttctcaaaagccgttccagtgccggatatgcatgcggaactttagtcggccatatacgcttcgacttcatattaggactcacaccggcgaaaagccgttcgcctgtgacatttgcgggagaaaattcgctgactctagtcaccgcacgaggcacactaaaatacatactggttcacaaaaaccattccagtgccgaatttgcatgcgaaatttttcccgaagtgaccatctctcacagcacatccgcacccatacaggggagaagcccttcgcttgtgatatatgcggacgcaagttcgcggacagctcacaccggacccgccatacaaagatccacttgagacagaaagatgcagcgcggggctccggaccgaaaaaaaagagaaaggtaaacggcgggggaggatcacggaccctggttacatttaaggacgtttttgtagacttcacgagggaggaatggaagctgttggacaccgcccagcaaatcgtgtatcgaaatgtaatgttggaaaattataaaaatctggtttccctcggctaccaattgacaaaaccagacgtcatcctcagactggaaaaaggggaagaaccttggcttgtctga

SEQ ID NO: 918 - DNA, 825 bp, Synthetic construct
  misc_feature 1..825: note = 3xFLAG-SV40 NLS--ZFP-SV40-NLS-KRAB (DNA Sequence)
  source 1..825: mol_type = other DNA
atggcaccgaagaaaaaacgcaaagttggtcgagtacccgccgcaatggccgaaagaccatttcagtgcaggatatgtatgcgcaacttctctcgcagtgaccacctgagtcaacatatcaggacacacacgggtgaaaagccttttgcatgcgatatttgtggtcgaaaatttgctcagtctgcggaccgaaccaagcacactaaaattcataccggctcacagaaaccgtttcaatgccgcatctgtatgaggaatttctctagatcagaccacttgtcccaacacatccggactcatactggagaaaagccgtttgcatgtgacatttgtggcaggaagtttgctagaaggtctgaccttaaaaggcacacaaaaattcatacgggttcccagaaaccatttcagtgccggatatgcatgcggaacttttcacgaagcgaccacctctcccgacatattcgaacgcacactggtgagaagccgtttgcttgcgacatttgcggacgcaagttcgctcagagctccgacttgaggaggcataccaagattcatctccggcagaaagatgccgcgcggggctccggaccgaaaaaaaagagaaaggtaaacggcgggggaggatcacggaccctggttacatttaaggacgtttttgtagacttcacgagggaggaatggaagctgttggacaccgcccagcaaatcgtgtatcgaaatgtaatgttggaaaattataaaaatctggtttccctcggctaccaattgacaaaaccagacgtcatcctcagactggaaaaaggggaagaaccttggcttgtctga

SEQ ID NO: 919 - DNA, 825 bp, Synthetic construct
  misc_feature 1..825: note = 3xFLAG-SV40 NLS--ZFP-SV40-NLS-KRAB (DNA Sequence)
  source 1..825: mol_type = other DNA
atggcaccgaagaaaaaacgcaaagttggtcgagtacccgccgcgatggctgagagaccatttcagtgtcgaatctgcatgagaaatttttcaaggagtgacaatctgtctgagcacatacgaacacatactggggaaaaaccctttgcatgtgacatttgtggaagaaagtttgctaccagctcaaatcgcaaaacacatacaaagatacataccggctcccaaaagccattccagtgccgcatctgcatgaggaacttttccgatcgctcacatcttacccgccacataagaactcacacaggcgaaaagccctttgcctgcgatatatgcggacggaagttcgcccgctccgacgctttgacccagcataccaaaatccatactgggtctcaaaagccatttcagtgccgaatctgtatgaggaatttctccgacaggtcagcattggcacggcatatccgcacccataccggtgagaagccttttgcttgcgatatctgtggacgaaaatttgcccggaggttcactctctccaaacacacaaagatacatctgcgccaaaaggatgcagcccggggctccggaccgaaaaaaaagagaaaggtaaacggcgggggaggatcacggaccctggttacatttaaggacgtttttgtagacttcacgagggaggaatggaagctgttggacaccgcccagcaaatcgtgtatcgaaatgtaatgttggaaaattataaaaatctggtttccctcggctaccaattgacaaaaccagacgtcatcctcagactggaaaaaggggaagaaccttggcttgtctga

SEQ ID NO: 920 - DNA, 825 bp, Synthetic construct
  misc_feature 1..825: note = 3xFLAG-SV40 NLS--ZFP-SV40-NLS-KRAB (DNA Sequence)
  source 1..825: mol_type = other DNA
atggcaccgaagaaaaaacgcaaagttggtcgagtacccgccgcaatggctgagcgcccgttccagtgcagaatatgcatgcggaatttttctaggtcagatcatttgtctgagcatattcgcacacacacgggagagaagccctttgcttgcgatatatgtggaaggaaattcgcgcaatacagtgggcgctactaccatacaaagatccatacgggctcccagaagcccttccaatgtcgaatatgtatgaggaattttagtcacggacaaacattgaatgaacatatacgcactcacactggtgaaaaaccatttgcgtgcgatatttgcggaaggaagtttgctcagtctgggaatttggcgcgacacaccaagatccacacaggatcccagaaaccatttcagtgcagaatttgtatgagaaactttagccgcagtgacagtctcttgaggcacatacggactcatactggggagaaaccattcgcctgcgatatttgtggacgaaagttcgcctgtcgcgagtacagaggcaagcacactaagatacatcttaggcaaaaggacgctgcacggggctccggaccgaaaaaaaagagaaaggtaaacggcgggggaggatcacggaccctggttacatttaaggacgtttttgtagacttcacgagggaggaatggaagctgttggacaccgcccagcaaatcgtgtatcgaaatgtaatgttggaaaattataaaaatctggtttccctcggctaccaattgacaaaaccagacgtcatcctcagactggaaaaaggggaagaaccttggcttgtctga

SEQ ID NO: 921 - DNA, 825 bp, Synthetic construct
  misc_feature 1..825: note = 3xFLAG-SV40 NLS--ZFP-SV40-NLS-KRAB (DNA Sequence)
  source 1..825: mol_type = other DNA
atggcaccgaagaaaaaacgcaaagttggtcgagtacccgccgcgatggctgagaggccttttcaatgtcgaatctgtatgaggaacttctctcaatctgctaatcgcacgacgcacattcgaacgcataccggtgagaagccattcgcgtgcgatatctgcggacggaaattcgcgaggtcagctaatcttacacggcacacgaagatccacacagggtcacagaaaccttttcagtgtcgcatttgcatgaggaatttctcccgatctgacgtccttagcgaacatatacgaactcacacgggcgagaagccatttgcgtgcgatatatgcgggaggaagtttgccacctctggacatctgagtcgacataccaaaattcataccggtagtcagaagccgttccaatgcagaatatgtatgcgaaatttctctcaaagctcagacttgtctaggcacataagaacgcacacgggtgaaaaacctttcgcgtgtgatatctgcggcagaaagttcgcacaatggtccacccgaaagcggcatacgaagattcacctcagacagaaagacgctgcccggggctccggaccgaaaaaaaagagaaaggtaaacggcgggggaggatcacggaccctggttacatttaaggacgtttttgtagacttcacgagggaggaatggaagctgttggacaccgcccagcaaatcgtgtatcgaaatgtaatgttggaaaattataaaaatctggtttccctcggctaccaattgacaaaaccagacgtcatcctcagactggaaaaaggggaagaaccttggcttgtctga

SEQ ID NO: 922 - DNA, 825 bp, Synthetic construct
  misc_feature 1..825: note = 3xFLAG-SV40 NLS--ZFP-SV40-NLS-KRAB (DNA Sequence)
  source 1..825: mol_type = other DNA
atggcaccgaagaaaaaacgcaaagttggtcgagtacccgcggcgatggcagaacgcccgttccaatgcagaatatgtatgagaaacttctcccagagcggaaatctggcacgccacatccggacacacacgggagagaagccatttgcttgtgacatttgtggtcgcaaatttgccgccacctgttgtctggcacatcatactaagatacatacggggtcacagaaaccattccaatgtaggatctgcatgcggaatttttctcggtggcagtatttgcctacgcatattagaacccacgccggtgagaaaccgtttgcatgtgacatctgcggacgaaagtttgccgatagatctgcgcttgctaggcatactaaaatccacacggggtcccagaagccttttcagtgtcggatatgtatgaggaacttcagtcgatcagacaaccttagcgagcatattcggacgcatactggagaaaaaccttttgcttgtgatatatgcggtaggaagttcgccaaacggtgtaaccttcgctgtcacaccaaaatacatcttcgccagaaagatgcggcccggggctccggaccgaaaaaaaagagaaaggtaaacggcgggggaggatcacggaccctggttacatttaaggacgtttttgtagacttcacgagggaggaatggaagctgttggacaccgcccagcaaatcgtgtatcgaaatgtaatgttggaaaattataaaaatctggtttccctcggctaccaattgacaaaaccagacgtcatcctcagactggaaaaaggggaagaaccttggcttgtctga

SEQ ID NO: 923 - DNA, 825 bp, Synthetic construct
  misc_feature 1..825: note = 3xFLAG-SV40 NLS--ZFP-SV40-NLS-KRAB (DNA Sequence)
  source 1..825: mol_type = other DNA
atggcaccgaagaaaaaacgcaaagttggtcgagtacccgccgctatggctgaaagaccattccagtgcagaatatgtatgaggaatttttctaatcccgcgaaccttacgcgccatatcaggacgcacacgggcgaaaagcccttcgcctgcgacatttgtgggagaaagtttgctcaaaacgcgaccaggacaaagcacacgaaaattcacactggtagccagaagccgttccagtgtaggatctgtatgcgcaatttctctcagtccgggcacctcgcgcgacacataagaactcatacgggggagaagccgtttgcatgtgacatctgcggccgcaagtttgcgaataggcatgacagggcaaaacatacgaagatccatacaggttctcaaaaacctttccaatgtcgaatatgcatgcgcaactttagtcggtcagaccacctttctgaacacatcaggacacacactggcgaaaagccgttcgcatgtgacatttgcggcagaaagttcgcacaaagacggtcccgctataagcacaccaaaattcaccttaggcaaaaggatgcagctcggggctccggaccgaaaaaaaagagaaaggtaaacggcgggggaggatcacggaccctggttacatttaaggacgtttttgtagacttcacgagggaggaatggaagctgttggacaccgcccagcaaatcgtgtatcgaaatgtaatgttggaaaattataaaaatctggtttccctcggctaccaattgacaaaaccagacgtcatcctcagactggaaaaaggggaagaaccttggcttgtctga

SEQ ID NO: 924 - DNA, 825 bp, Synthetic construct
  misc_feature 1..825: note = 3xFLAG-SV40 NLS--ZFP-SV40-NLS-KRAB (DNA Sequence)
  source 1..825: mol_type = other DNA
atggcaccgaagaaaaaacgcaaagttggtcgagtacccgcggcaatggcagaacgacccttccaatgccgcatatgtatgcgaaacttcagccagagctcagatctttccagacacatcaggactcacactggcgaaaaaccatttgcatgcgatatatgcgggagaaaattcgcgcaccgcagtacgcgaaacaggcatacaaagatacatactggcagtcaaaagccatttcaatgtcgaatatgcatgaggaactttagtcgatctgacgtgctgagcgctcacatacggacccataccggagagaaaccattcgcttgtgacatctgtggtaggaagttcgcggattcccggacccgcaaaaatcatactaaaattcacactgggtctcagaagccctttcagtgtaggatatgtatgcgcaattttagccagagtggttcattgactcggcatatcagaacacatactggagagaaacctttcgcgtgtgatatttgcggtcgaaagttcgcagatcagagtggacttgcgcaccatactaagatccacctgagacagaaggacgctgcgcggggctccggaccgaaaaaaaagagaaaggtaaacggcgggggaggatcacggaccctggttacatttaaggacgtttttgtagacttcacgagggaggaatggaagctgttggacaccgcccagcaaatcgtgtatcgaaatgtaatgttggaaaattataaaaatctggtttccctcggctaccaattgacaaaaccagacgtcatcctcagactggaaaaaggggaagaaccttggcttgtctga

SEQ ID NO: 925 - DNA, 825 bp, Synthetic construct
  misc_feature 1..825: note = 3xFLAG-SV40 NLS--ZFP-SV40-NLS-KRAB (DNA Sequence)
  source 1..825: mol_type = other DNA
atggcaccgaagaaaaaacgcaaagttggtcgagtacccgctgccatggcggagcgccctttccagtgtaggatatgtatgcgcaacttcagtcagaacccagcccagtggcggcacatacggacgcatactggagaaaagccatttgcatgtgatatctgcgggcgaaaattcgcgcggtcagcagatttgagccggcatacgaagatccatacaggttcacaaaagccatttcaatgtcggatatgtatgcggaacttcagcacgtccggctcattgtcaagacatatacgaactcataccggagagaaacccttcgcgtgcgacatttgcggtcggaagttcgcgcgatccgaccatctgtcacgacatacgaaaatacacactggctctcaaaagccgtttcagtgcagaatttgcatgagaaattttagcaggagcgactcactccttcggcatatacgaacacacactggtgagaagccatttgcctgtgatatttgtggacgaaagtttgcgcaatcttacgataggtttcagcatacaaaaatccaccttcggcaaaaggacgcggcacggggctccggaccgaaaaaaaagagaaaggtaaacggcgggggaggatcacggaccctggttacatttaaggacgtttttgtagacttcacgagggaggaatggaagctgttggacaccgcccagcaaatcgtgtatcgaaatgtaatgttggaaaattataaaaatctggtttccctcggctaccaattgacaaaaccagacgtcatcctcagactggaaaaaggggaagaaccttggcttgtctga

SEQ ID NO: 926 - DNA, 825 bp, Synthetic construct
  misc_feature 1..825: note = 3xFLAG-SV40 NLS--ZFP-SV40-NLS-KRAB (DNA Sequence)
  source 1..825: mol_type = other DNA
atggcaccgaagaaaaaacgcaaagttggtcgagtacccgctgccatggctgaacgaccgtttcaatgtcgaatttgcatgcgcaacttctccacgtccgggtctctcagtagacacatcagaacgcatactggtgaaaaaccattcgcttgtgacatatgcggccgaaaattcgcgcggagcgaccacctgtcacggcataccaaaattcacaccgggagtcaaaaaccgttccagtgtaggatatgtatgcgcaacttcagccggtctgacagtctgcttcgacatattcggacgcacactggtgaaaagccgtttgcgtgcgacatttgtggtcgaaagttcgctcaatcttatgataggtttcaacacaccaaaatacatacgggctcccagaagccgttccagtgcagaatatgcatgagaaatttctctcgcagtgacaatttgtccacccatattcgaacgcacaccggcgagaaacccttcgcctgcgatatttgcggtcgcaagttcgcagacaacagggataggataaaacatacgaagatccatctgaggcaaaaagacgccgcccggggctccggaccgaaaaaaaagagaaaggtaaacggcgggggaggatcacggaccctggttacatttaaggacgtttttgtagacttcacgagggaggaatggaagctgttggacaccgcccagcaaatcgtgtatcgaaatgtaatgttggaaaattataaaaatctggtttccctcggctaccaattgacaaaaccagacgtcatcctcagactggaaaaaggggaagaaccttggcttgtctga

SEQ ID NO: 927 - DNA, 825 bp, Synthetic construct
  misc_feature 1..825: note = 3xFLAG-SV40 NLS--ZFP-SV40-NLS-KRAB (DNA Sequence)
  source 1..825: mol_type = other DNA
atggcaccgaagaaaaaacgcaaagttggtcgagtacccgcagccatggcagagcggccattccagtgcagaatctgcatgcggaacttttccgataggtccaatctgtcacgccatattaggacacacacgggtgaaaaaccgttcgcgtgtgacatatgcggtcgcaaattcgccctgagacagaacctgattatgcacacaaaaatacatacgggaagccagaaaccgttccagtgtcggatatgcatgaggaacttcagtgagagggggactttggcgaggcacatcaggactcacactggggagaagccctttgcatgtgatatctgtggccgaaaatttgctcgatcagatgctctcacccaacatacaaagatccatactggctctcaaaaaccgtttcaatgtagaatttgtatgcgcaacttctctcggtcagatagcctgtcccagcatatccgaactcatacaggtgagaaacccttcgcatgcgacatctgtgggcgaaaatttgctagaaaagcagaccggacccgacacacaaagattcatctgcgacaaaaagacgccgcccggggctccggaccgaaaaaaaagagaaaggtaaacggcgggggaggatcacggaccctggttacatttaaggacgtttttgtagacttcacgagggaggaatggaagctgttggacaccgcccagcaaatcgtgtatcgaaatgtaatgttggaaaattataaaaatctggtttccctcggctaccaattgacaaaaccagacgtcatcctcagactggaaaaaggggaagaaccttggcttgtctga

SEQ ID NO: 928 - DNA, 825 bp, Synthetic construct
  misc_feature 1..825: note = 3xFLAG-SV40 NLS--ZFP-SV40-NLS-KRAB (DNA Sequence)
  source 1..825: mol_type = other DNA
atggcaccgaagaaaaaacgcaaagttggtcgagtacccgcggccatggctgagaggccttttcaatgtagaatatgtatgcgaaatttttcacagtactgttgtctcacgaaccacataaggactcatacaggggagaaaccatttgcctgtgacatttgcggtcgcaaatttgctacttctggaaacctgactcggcacactaagattcacacagggtcccagaagcccttccagtgtcgcatttgcatgaggaattttagtcaaagctctgacttgtcaaggcatattcgcacgcacacgggcgaaaagccgttcgcttgcgacatatgcgggcggaaatttgccttccgctattatttgaagagacacaccaagatacatacgggctctcagaagccctttcagtgtaggatttgcatgcgcaatttttcacaatctggtgatctcacgcgacacatccggactcacacaggtgaaaagcctttcgcgtgcgacatttgcggccggaagtttgctgacaagggcaacctcacaaagcatacgaagattcacttgaggcagaaagatgctgctcggggctccggaccgaaaaaaaagagaaaggtaaacggcgggggaggatcacggaccctggttacatttaaggacgtttttgtagacttcacgagggaggaatggaagctgttggacaccgcccagcaaatcgtgtatcgaaatgtaatgttggaaaattataaaaatctggtttccctcggctaccaattgacaaaaccagacgtcatcctcagactggaaaaaggggaagaaccttggcttgtctga

SEQ ID NO: 929 - DNA, 825 bp, Synthetic construct
  misc_feature 1..825: note = 3xFLAG-SV40 NLS--ZFP-SV40-NLS-KRAB (DNA Sequence)
  source 1..825: mol_type = other DNA
atggcaccgaagaaaaaacgcaaagttggtcgagtacccgccgccatggccgaacgaccattccagtgcaggatatgtatgcgcaatttttcaaccagtggttcattgtcacgacatattagaacacacaccggtgagaaaccctttgcgtgtgacatctgtgggaggaaattcgcaagatctgacaaccttacgacacatacaaagattcacacaggctctcaaaagcccttccagtgccgaatttgcatgcgaaacttttcccagtctggtaatctcgctcgacatatcagaacccacacgggggaaaaaccattcgcttgtgatatttgcggacgaaagttcgccgacagaaccacactcatgagacacactaaaatccatactggtagtcagaagccgtttcagtgtagaatctgcatgaggaacttttcccagtcaggccaccttgcaagacatatacgaactcacactggagaaaagccgttcgcctgtgacatttgtgggcgcaagttcgcgcaactcacccatctgaatagccatacgaagattcacttgagacagaaagatgcggctcggggctccggaccgaaaaaaaagagaaaggtaaacggcgggggaggatcacggaccctggttacatttaaggacgtttttgtagacttcacgagggaggaatggaagctgttggacaccgcccagcaaatcgtgtatcgaaatgtaatgttggaaaattataaaaatctggtttccctcggctaccaattgacaaaaccagacgtcatcctcagactggaaaaaggggaagaaccttggcttgtctga

SEQ ID NO: 930 - DNA, 825 bp, Synthetic construct
  misc_feature 1..825: note = 3xFLAG-SV40 NLS--ZFP-SV40-NLS-KRAB (DNA Sequence)
  source 1..825: mol_type = other DNA
atggcaccgaagaaaaaacgcaaagttggtcgagtacccgcagctatggctgaacgcccattccagtgtcggatctgcatgcgcaacttttctataaaacacgatcttcaccgacacattcggacacatactggggagaagccctttgcgtgtgacatctgtggccgaaagttcgctagatccgcaaacttgactcggcatacgaaaattcacactggaagccagaaacctttccaatgtcgaatctgtatgaggaactttagcagaagtgataatctcgccaggcatatccgaacgcacacaggcgagaagccattcgcatgtgatatttgtggtagaaagttcgcccaaaatgtctctcgcccacgccatactaagatccacacgggctcccagaagccgttccaatgccgcatttgcatgcgaaacttttccagatcagacgatctgagcaagcatattaggacgcatacaggggagaagccttttgcttgcgacatttgcggccggaaatttgctgactcaagtcacagaacacggcataccaagatacaccttcgacaaaaagatgccgcacggggctccggaccgaaaaaaaagagaaaggtaaacggcgggggaggatcacggaccctggttacatttaaggacgtttttgtagacttcacgagggaggaatggaagctgttggacaccgcccagcaaatcgtgtatcgaaatgtaatgttggaaaattataaaaatctggtttccctcggctaccaattgacaaaaccagacgtcatcctcagactggaaaaaggggaagaaccttggcttgtctga

SEQ ID NO: 931 - DNA, 825 bp, Synthetic construct
  misc_feature 1..825: note = 3xFLAG-SV40 NLS--ZFP-SV40-NLS-KRAB (DNA Sequence)
  source 1..825: mol_type = other DNA
atggcaccgaagaaaaaacgcaaagttggtcgagtacccgcggccatggcggaacgaccctttcagtgccgaatttgcatgaggaacttttcacgatctgataacctggcgaggcacatccgaacacatacgggcgagaagccattcgcatgtgatatctgcgggcgaaagttcgcccaaaatgtcagtagaccgcgacatactaaaatacacactggctcacagaagccgttccaatgccgcatctgtatgcgcaatttttcccgaagcgacgatctgtctaaacatattcggacgcacactggggaaaagcctttcgcttgtgacatctgtgggaggaagttcgctgacagctctcataggacacgccatactaagattcataccggaagccagaagcctttccagtgtcggatttgcatgagaaactttagcacttctagcaacagaaagacacatatacgaacccatacgggtgagaaaccgttcgcatgcgatatctgtgggcgaaaatttgcagcccaatggaccagagcttgccataccaagatacaccttcggcagaaggacgctgcacggggctccggaccgaaaaaaaagagaaaggtaaacggcgggggaggatcacggaccctggttacatttaaggacgtttttgtagacttcacgagggaggaatggaagctgttggacaccgcccagcaaatcgtgtatcgaaatgtaatgttggaaaattataaaaatctggtttccctcggctaccaattgacaaaaccagacgtcatcctcagactggaaaaaggggaagaaccttggcttgtctga

SEQ ID NO: 932 - DNA, 825 bp, Synthetic construct
  misc_feature 1..825: note = 3xFLAG-SV40 NLS--ZFP-SV40-NLS-KRAB (DNA Sequence)
  source 1..825: mol_type = other DNA
atggcaccgaagaaaaaacgcaaagttggtcgagtacccgctgcgatggcagaacgaccttttcaatgccgaatttgtatgaggaacttttcccggtcagacgacctttccaagcacatcagaactcataccggagaaaaaccgttcgcctgtgacatttgtggacggaagtttgctgactcctctcacaggactcgccacactaagatacacaccggaagtcagaagcccttccaatgtaggatatgcatgagaaacttcagtacgtcatcaaaccgaaaaacgcatatcaggacacataccggcgaaaagccgtttgcatgtgatatctgcggcaggaaatttgcagctcagtggacacgggcatgtcacacaaaaatccataccggtagtcaaaaaccgtttcagtgtcgaatctgcatgaggaactttagccggaagcagacgagaaccacgcatataagaactcacacaggtgagaaaccctttgcgtgcgatatctgcggtcgcaaatttgctcaccgatcctccctgaggcgacatactaaaatacatctgcgacagaaagacgcggctcggggctccggaccgaaaaaaaagagaaaggtaaacggcgggggaggatcacggaccctggttacatttaaggacgtttttgtagacttcacgagggaggaatggaagctgttggacaccgcccagcaaatcgtgtatcgaaatgtaatgttggaaaattataaaaatctggtttccctcggctaccaattgacaaaaccagacgtcatcctcagactggaaaaaggggaagaaccttggcttgtctga

SEQ ID NO: 933 - DNA, 825 bp, Synthetic construct
  misc_feature 1..825: note = 3xFLAG-SV40 NLS--ZFP-SV40-NLS-KRAB (DNA Sequence)
  source 1..825: mol_type = other DNA
atggcaccgaagaaaaaacgcaaagttggtcgagtacccgccgccatggcagaacggccttttcagtgtcggatctgcatgagaaactttagtcagagtgcccatcgcaagaatcatattcgaactcataccggtgaaaaaccgttcgcgtgcgacatctgtggtcgaaagtttgccacatcatccaatagaaaaacgcatactaagattcataccggtagccagaaaccattccaatgtagaatctgcatgcgaaatttcagcaggagtgacaatttgtccgcacatatacggacacacacgggcgaaaaaccctttgcttgcgatatatgcggtagaaagttcgctaggaacaacgaccgaaaaacacacacgaagattcatacaggtagtcagaagccatttcaatgtcggatctgtatgcgaaatttctctacttctggcagcctgtcccggcacatcagaacacataccggtgagaagccatttgcatgtgacatatgtgggagaaaatttgcccaggcgggtcaccttgcgaagcatacaaagatccacctccgccagaaggacgccgcacggggctccggaccgaaaaaaaagagaaaggtaaacggcgggggaggatcacggaccctggttacatttaaggacgtttttgtagacttcacgagggaggaatggaagctgttggacaccgcccagcaaatcgtgtatcgaaatgtaatgttggaaaattataaaaatctggtttccctcggctaccaattgacaaaaccagacgtcatcctcagactggaaaaaggggaagaaccttggcttgtctga

SEQ ID NO: 934 - DNA, 825 bp, Synthetic construct
  misc_feature 1..825: note = 3xFLAG-SV40 NLS--ZFP-SV40-NLS-KRAB (DNA Sequence)
  source 1..825: mol_type = other DNA
atggcaccgaagaaaaaacgcaaagttggtcgagtacccgcggctatggcagagcggccattccaatgtaggatatgtatgaggaacttctcccggagcgatcacctgtcccaacacatccgcacgcatacgggtgagaagccgtttgcttgtgatatctgcggaagaaaatttgcagcatccagtacacgcacaaagcatacgaagattcatacgggatcccaaaagccctttcaatgcaggatttgtatgaggaacttcagtcggtccgacgatctgacacgacatattagaactcatactggagagaagccattcgcatgtgacatctgcggtaggaagttcgcgcagaaatctaacctgtcatctcacaccaagatacatacaggctcacagaagccgtttcaatgccgcatctgcatgaggaatttcagccagtccgcaaacagaactacgcatattcggacgcataccggcgagaagccgtttgcctgcgacatttgcgggaggaaattcgcacagaacgcgaccagaaccaaacacaccaaaatccatcttaggcaaaaggatgcggcccggggctccggaccgaaaaaaaagagaaaggtaaacggcgggggaggatcacggaccctggttacatttaaggacgtttttgtagacttcacgagggaggaatggaagctgttggacaccgcccagcaaatcgtgtatcgaaatgtaatgttggaaaattataaaaatctggtttccctcggctaccaattgacaaaaccagacgtcatcctcagactggaaaaaggggaagaaccttggcttgtctga

SEQ ID NO: 935 - DNA, 825 bp, Synthetic construct
  misc_feature 1..825: note = 3xFLAG-SV40 NLS--ZFP-SV40-NLS-KRAB (DNA Sequence)
  source 1..825: mol_type = other DNA
atggcaccgaagaaaaaacgcaaagttggtcgagtacccgcggccatggcagaacgaccctttcagtgccgaatttgcatgcggaactttagtcgcagtgacaccctgagcgagcatattcgcacgcatacgggagagaagccatttgcatgcgacatctgcggtagaaagtttgcgaggcgctggacgttggtaggccacacgaaaatccatacaggctcccagaaacccttccagtgcagaatttgtatgcgcaattttagtgacagaagtaacttgtcccgacatataaggacgcacaccggcgaaaaaccgtttgcctgtgatatctgtggtcggaaattcgcccagtccggtgacttgacacggcataccaaaatacacactggaagccaaaagccttttcagtgtcgcatatgtatgcgcaacttcagccagagtagtgacctttcacggcatatacggacgcatacgggtgagaaacccttcgcctgtgacatttgcgggcgaaagtttgcatatcattggtacctgaaaaaacatacgaaaatacatttgagacaaaaagatgcagcccggggctccggaccgaaaaaaaagagaaaggtaaacggcgggggaggatcacggaccctggttacatttaaggacgtttttgtagacttcacgagggaggaatggaagctgttggacaccgcccagcaaatcgtgtatcgaaatgtaatgttggaaaattataaaaatctggtttccctcggctaccaattgacaaaaccagacgtcatcctcagactggaaaaaggggaagaaccttggcttgtctga

SEQ ID NO: 936 - DNA, 825 bp, Synthetic construct
  misc_feature 1..825: note = 3xFLAG-SV40 NLS--ZFP-SV40-NLS-KRAB (DNA Sequence)
  source 1..825: mol_type = other DNA
atggcaccgaagaaaaaacgcaaagttggtcgagtacccgctgccatggccgagcgcccgtttcaatgcagaatatgtatgaggaacttctctagaagcgccaatcttgcgcgacacattagaactcacacaggcgagaaacctttcgcctgtgacatctgcggcagaaaatttgcgcgaagtgataacttgcgcgagcacacaaaaatccataccggttcccaaaagccctttcaatgtaggatttgcatgaggaacttttcaagaccatacacgctgagactccacattcgcacgcatacgggagaaaaaccatttgcttgtgacatatgcggccgaaagtttgcacaccgatccaacttgaataagcataccaaaatccatacggggtctcagaaacccttccagtgtcggatttgtatgcgaaacttctctcagagtggttctcttacgcgccacattagaacccacacgggggaaaagccattcgcgtgcgatatctgtggccggaaatttgctacttccgcaaatctttctcgacatacaaagatacatcttagacagaaggatgcggcacggggctccggaccgaaaaaaaagagaaaggtaaacggcgggggaggatcacggaccctggttacatttaaggacgtttttgtagacttcacgagggaggaatggaagctgttggacaccgcccagcaaatcgtgtatcgaaatgtaatgttggaaaattataaaaatctggtttccctcggctaccaattgacaaaaccagacgtcatcctcagactggaaaaaggggaagaaccttggcttgtctga

SEQ ID NO: 937 - DNA, 813 bp, Synthetic construct
  misc_feature 1..813: note = 3xFLAG-SV40 NLS--ZFP-SV40-NLS-KRAB (DNA Sequence)
  source 1..813: mol_type = other DNA
atggcaccgaagaaaaaacgcaaagttggtcgagtacccttggagcccggtgaaaaaccatatgcctgtccagagtgtggaaaaagttttagcagaagcgacgacctggttaggcatcaacgaactcacacaggggaaaagccgtacaaatgtcctgaatgcggaaagtcattctccacttcaggtagcctcgtgcgacatcagcgcacacatactggcgaaaaaccttataagtgtccggaatgcggcaagagtttttctagaagtgataagctcgtgcgacaccagcggacgcacacgggtgagaagccctacgcctgcccagagtgcggaaagtcctttagtaggtctgacgaactggtccggcaccaacgaacccatacaggggagaaaccctacaaatgtccagagtgcgggaaatcattttcaacgtctcacagcttgacggaacatcagaggacccatacaggcgaaaagccttacaaatgtccggagtgcggaaagtctttcagccgggctgataatctcacggagcaccaaagaacccacacgggtaagaaaacctctggctccggaccgaaaaaaaagagaaaggtaaacggcgggggaggatcacggaccctggttacatttaaggacgtttttgtagacttcacgagggaggaatggaagctgttggacaccgcccagcaaatcgtgtatcgaaatgtaatgttggaaaattataaaaatctggtttccctcggctaccaattgacaaaaccagacgtcatcctcagactggaaaaaggggaagaaccttggcttgtctga

SEQ ID NO: 938 - DNA, 813 bp, Synthetic construct
  misc_feature 1..813: note = 3xFLAG-SV40 NLS--ZFP-SV40-NLS-KRAB (DNA Sequence)
  source 1..813: mol_type = other DNA
atggcaccgaagaaaaaacgcaaagttggtcgagtacccttggagccgggagaaaagccatatgcctgtccggaatgcggcaaaagcttttcagaacggtcccatttgcgggaacatcagcgcacccataccggagaaaagccttacaagtgtcccgagtgtggtaagagcttttcaacttcccacagtctcactgaacatcagcgaactcacacaggcgaaaaaccatacaaatgcccggagtgtggaaagagtttttctcaagctgggcacttggccagccaccaaaggactcatacgggcgagaaaccgtatgcctgtccagaatgcgggaaatcattttctactagtcattcccttacggaacatcagagaacgcacaccggggagaagccatacaagtgtccggagtgcggaaaatcattctccgacccgggtcatctcgttcgccatcagaggactcatactggagagaaaccgtataaatgtcctgaatgcgggaagagcttttctacatctgggaaccttgtgcggcaccagcgaacccacacggggaaaaagacttctggctccggaccgaaaaaaaagagaaaggtaaacggcgggggaggatcacggaccctggttacatttaaggacgtttttgtagacttcacgagggaggaatggaagctgttggacaccgcccagcaaatcgtgtatcgaaatgtaatgttggaaaattataaaaatctggtttccctcggctaccaattgacaaaaccagacgtcatcctcagactggaaaaaggggaagaaccttggcttgtctga

SEQ ID NO: 939 - DNA, 813 bp, Synthetic construct
  misc_feature 1..813: note = 3xFLAG-SV40 NLS--ZFP-SV40-NLS-KRAB (DNA Sequence)
  source 1..813: mol_type = other DNA
atggcaccgaagaaaaaacgcaaagttggtcgagtacccctggaaccgggtgaaaaaccctacgcttgtcccgagtgtgggaaatcattctcaagggcagataatcttacggaacatcagcgcacacacaccggggaaaaaccctataagtgccctgagtgtggtaaatcattctctacgtcagggtcattggtgcgccatcagaggacccatacaggcgaaaaaccgtataagtgccccgaatgcggtaaaagcttcagcagaaaagataacttgaaaaatcaccaacgcactcacacgggagaaaaaccgtacgcatgcccggagtgcggcaagagtttcagtcagagtagctcacttgttcgccaccaaagaacccacacaggcgaaaagccctacaagtgtcctgaatgtggaaagagtttcagtcgaagtgataaattggttaggcaccaaagaacacacactggagagaaaccgtacaagtgtccagaatgtggcaagtctttttctgattctggaaatttgcgcgtccatcaaaggactcatactgggaaaaagacgtccggctccggaccgaaaaaaaagagaaaggtaaacggcgggggaggatcacggaccctggttacatttaaggacgtttttgtagacttcacgagggaggaatggaagctgttggacaccgcccagcaaatcgtgtatcgaaatgtaatgttggaaaattataaaaatctggtttccctcggctaccaattgacaaaaccagacgtcatcctcagactggaaaaaggggaagaaccttggcttgtctga

SEQ ID NO: 940 - DNA, 813 bp, Synthetic construct
  misc_feature 1..813: note = 3xFLAG-SV40 NLS--ZFP-SV40-NLS-KRAB (DNA Sequence)
  source 1..813: mol_type = other DNA
atggcaccgaagaaaaaacgcaaagttggtcgagtacccctcgaaccaggggaaaagccatacgcttgccccgagtgtggaaaatctttctctcagtcaagctcccttgtcagacaccagagaacccatacgggtgagaaaccatacaagtgcccagagtgcggcaaaagcttcagtcagagtggcgatctgcgccggcatcaaagaactcacactggagaaaagccctataagtgccccgaatgtggaaagagtttttccaggagtgacgaaagaaagagacaccagcggactcacaccggcgagaaaccatacgcatgccccgagtgcggaaaaagtttttcccaccgcacaacccttaccaatcatcaacgcacgcacacaggggagaaaccctacaagtgcccggagtgtggcaagtcattcagccgaagtgaccacctcactaaccaccaaaggactcacacaggagaaaaaccctacaaatgtccggagtgcggaaaatctttttccacgtccggtgagctggtccgccatcaacgaacccatactggtaaaaaaactagcggctccggaccgaaaaaaaagagaaaggtaaacggcgggggaggatcacggaccctggttacatttaaggacgtttttgtagacttcacgagggaggaatggaagctgttggacaccgcccagcaaatcgtgtatcgaaatgtaatgttggaaaattataaaaatctggtttccctcggctaccaattgacaaaaccagacgtcatcctcagactggaaaaaggggaagaaccttggcttgtctga

SEQ ID NO: 941 - DNA, 813 bp, Synthetic construct
  misc_feature 1..813: note = 3xFLAG-SV40 NLS--ZFP-SV40-NLS-KRAB (DNA Sequence)
  source 1..813: mol_type = other DNA
atggcaccgaagaaaaaacgcaaagttggtcgagtacccctggaacccggggagaagccgtacgcttgcccagagtgcggaaagagcttctctcagagcggagaccttagacgccaccagcgaacccacaccggcgaaaaaccgtataaatgcccggaatgcggcaagagttttagtcggtccgatgagcgaaagaggcatcaacgaacccatacgggagagaaaccctacaagtgccctgagtgtggtaagtcattttcccacagaacgacgttgacgaatcaccagagaacccatacgggtgagaaaccttacgcttgcccggagtgcggcaaaagcttcagccggagtgatcacttgaccaatcatcagaggacacacacgggtgagaagccctacaaatgtcccgaatgcggcaagtctttctcaacgtcaggcgaactcgtccggcaccagcgaacacatacgggagaaaagccgtacaaatgtccggaatgcggaaagtcattttcacggtcagatgacttggtgcgacaccagcgcactcacacaggcaagaagacctcaggctccggaccgaaaaaaaagagaaaggtaaacggcgggggaggatcacggaccctggttacatttaaggacgtttttgtagacttcacgagggaggaatggaagctgttggacaccgcccagcaaatcgtgtatcgaaatgtaatgttggaaaattataaaaatctggtttccctcggctaccaattgacaaaaccagacgtcatcctcagactggaaaaaggggaagaaccttggcttgtctga

SEQ ID NO: 942 - DNA, 813 bp, Synthetic construct
  misc_feature 1..813: note = 3xFLAG-SV40 NLS--ZFP-SV40-NLS-KRAB (DNA Sequence)
  source 1..813: mol_type = other DNA
atggcaccgaagaaaaaacgcaaagttggtcgagtacccctggagcctggtgagaagccgtatgcatgtcctgagtgtgggaagtcatttagtcagagggcccacttggaacgacaccaaaggacccacactggtgaaaaaccctacaaatgcccagagtgtggtaagtctttttcacagctggcccacctgagagcacaccagcgaactcatacgggcgagaaaccatacaagtgtccagagtgcggaaagtcattctcagatcccggccacttggtgcgacatcagagaacgcacacaggggagaagccttatgcttgcccggaatgcgggaagtctttcagccgccgaagtgcttgtcgaaggcaccaacggacccataccggtgagaaaccatataagtgcccagagtgtggaaagagttttagtcgatccgatcacctgactacgcaccagcggacgcacacaggagagaaaccgtataagtgccctgaatgcggtaagagcttctctcaatcaagctcactggttaggcaccaacgcactcataccggcaagaagacgtcaggctccggaccgaaaaaaaagagaaaggtaaacggcgggggaggatcacggaccctggttacatttaaggacgtttttgtagacttcacgagggaggaatggaagctgttggacaccgcccagcaaatcgtgtatcgaaatgtaatgttggaaaattataaaaatctggtttccctcggctaccaattgacaaaaccagacgtcatcctcagactggaaaaaggggaagaaccttggcttgtctga

SEQ ID NO: 943 - DNA, 813 bp, Synthetic construct
  misc_feature 1..813: note = 3xFLAG-SV40 NLS--ZFP-SV40-NLS-KRAB (DNA Sequence)
  source 1..813: mol_type = other DNA
atggcaccgaagaaaaaacgcaaagttggtcgagtaccccttgagccgggggaaaagccttatgcttgcccagagtgtggcaagagcttctcccaaagttcaaacctcgtccgacaccaaaggactcacacgggcgaaaaaccgtataaatgccccgagtgcggaaagtcattttccaggtccgacgatctggtccgccaccagcgcactcatacgggggaaaagccctataagtgccctgagtgcggcaagagcttctcaactcacctggatctcattcgccatcaacgcacacatacaggggagaagccttacgcttgtccagagtgcggcaagtctttcagtacgagcggaaacctgacggaacaccagcgaacccacacgggcgagaagccatataaatgtcccgaatgtggaaaatcattctctcgccgatctgcgtgccgccggcatcagaggacacataccggagaaaagccgtacaaatgccccgagtgtggaaaatcctttagcagaaatgatacacttaccgagcatcagaggacgcacactggaaaaaagacatctggctccggaccgaaaaaaaagagaaaggtaaacggcgggggaggatcacggaccctggttacatttaaggacgtttttgtagacttcacgagggaggaatggaagctgttggacaccgcccagcaaatcgtgtatcgaaatgtaatgttggaaaattataaaaatctggtttccctcggctaccaattgacaaaaccagacgtcatcctcagactggaaaaaggggaagaaccttggcttgtctga

SEQ ID NO: 944 - protein, 274 aa, Synthetic construct
  REGION 1..274: note = 3xFLAG-SV40 NLS--ZFP-SV40-NLS-KRAB fusion (AA Sequence)
MAPKKKRKVGRVPAAMAERPFQCRICMRNFSSEADRSRHIRTHTGEKPFACDICGRKFADRSNLTRHTKIHTGSQKPFQCRICMRNFSQSSDLSRHIRTHTGEKPFACDICGRKFAYHWYLKKHTKIHTGSQKPFQCRICMRNFSRSDSLSVHIRTHTGEKPFACDICGRKFAQNANRKTHTKIHLRQKDAARGSGPKKKRKVNGGGGSRTLVTFKDVFVDFTREEWKLLDTAQQIVYRNVMLENYKNLVSLGYQLTKPDVILRLEKGEEPWLV

SEQ ID NO: 945 - protein, 274 aa, Synthetic construct
  REGION 1..274: note = 3xFLAG-SV40 NLS--ZFP-SV40-NLS-KRAB fusion (AA Sequence)
MAPKKKRKVGRVPAAMAERPFQCRICMRNFSRSDVLSTHIRTHTGEKPFACDICGKKFADNSSRTRHTKIHTGSQKPFQCRICMRNFSRPYTLRLHIRTHTGEKPFACDICGRKFADSSHRTRHTKIHTGSQKPFQCRICMRNFSRSDHLSQHIRTHTGEKPFACDICGRKFADSSHRTRHTKIHLRQKDAARGSGPKKKRKVNGGGGSRTLVTFKDVFVDFTREEWKLLDTAQQIVYRNVMLENYKNLVSLGYQLTKPDVILRLEKGEEPWLV

SEQ ID NO: 946 - protein, 274 aa, Synthetic construct
  REGION 1..274: note = 3xFLAG-SV40 NLS--ZFP-SV40-NLS-KRAB fusion (AA Sequence)
MAPKKKRKVGRVPAAMAERPFQCRICMRNFSRSDHLSQHIRTHTGEKPFACDICGRKFAQSADRTKHTKIHTGSQKPFQCRICMRNFSRSDHLSQHIRTHTGEKPFACDICGRKFARRSDLKRHTKIHTGSQKPFQCRICMRNFSRSDHLSRHIRTHTGEKPFACDICGRKFAQSSDLRRHTKIHLRQKDAARGSGPKKKRKVNGGGGSRTLVTFKDVFVDFTREEWKLLDTAQQIVYRNVMLENYKNLVSLGYQLTKPDVILRLEKGEEPWLV

SEQ ID NO: 947 - protein, 274 aa, Synthetic construct
  REGION 1..274: note = 3xFLAG-SV40 NLS--ZFP-SV40-NLS-KRAB fusion (AA Sequence)
MAPKKKRKVGRVPAAMAERPFQCRICMRNFSRSDNLSEHIRTHTGEKPFACDICGRKFATSSNRKTHTKIHTGSQKPFQCRICMRNFSDRSHLTRHIRTHTGEKPFACDICGRKFARSDALTQHTKIHTGSQKPFQCRICMRNFSDRSALARHIRTHTGEKPFACDICGRKFARRFTLSKHTKIHLRQKDAARGSGPKKKRKVNGGGGSRTLVTFKDVFVDFTREEWKLLDTAQQIVYRNVMLENYKNLVSLGYQLTKPDVILRLEKGEEPWLV

SEQ ID NO: 948 - protein, 274 aa, Synthetic construct
  REGION 1..274: note = 3xFLAG-SV40 NLS--ZFP-SV40-NLS-KRAB fusion (AA Sequence)
MAPKKKRKVGRVPAAMAERPFQCRICMRNFSRSDHLSEHIRTHTGEKPFACDICGRKFAQYSGRYYHTKIHTGSQKPFQCRICMRNFSHGQTLNEHIRTHTGEKPFACDICGRKFAQSGNLARHTKIHTGSQKPFQCRICMRNFSRSDSLLRHIRTHTGEKPFACDICGRKFACREYRGKHTKIHLRQKDAARGSGPKKKRKVNGGGGSRTLVTFKDVFVDFTREEWKLLDTAQQIVYRNVMLENYKNLVSLGYQLTKPDVILRLEKGEEPWLV

SEQ ID NO: 949 - protein, 274 aa, Synthetic construct
  REGION 1..274: note = 3xFLAG-SV40 NLS--ZFP-SV40-NLS-KRAB fusion (AA Sequence)
MAPKKKRKVGRVPAAMAERPFQCRICMRNFSQSANRTTHIRTHTGEKPFACDICGRKFARSANLTRHTKIHTGSQKPFQCRICMRNFSRSDVLSEHIRTHTGEKPFACDICGRKFATSGHLSRHTKIHTGSQKPFQCRICMRNFSQSSDLSRHIRTHTGEKPFACDICGRKFAQWSTRKRHTKIHLRQKDAARGSGPKKKRKVNGGGGSRTLVTFKDVFVDFTREEWKLLDTAQQIVYRNVMLENYKNLVSLGYQLTKPDVILRLEKGEEPWLV

SEQ ID NO: 950 - protein, 274 aa, Synthetic construct
  REGION 1..274: note = 3xFLAG-SV40 NLS--ZFP-SV40-NLS-KRAB fusion (AA Sequence)
MAPKKKRKVGRVPAAMAERPFQCRICMRNFSQSGNLARHIRTHTGEKPFACDICGRKFAATCCLAHHTKIHTGSQKPFQCRICMRNFSRWQYLPTHIRTHAGEKPFACDICGRKFADRSALARHTKIHTGSQKPFQCRICMRNFSRSDNLSEHIRTHTGEKPFACDICGRKFAKRCNLRCHTKIHLRQKDAARGSGPKKKRKVNGGGGSRTLVTFKDVFVDFTREEWKLLDTAQQIVYRNVMLENYKNLVSLGYQLTKPDVILRLEKGEEPWLV

SEQ ID NO: 951 - protein, 274 aa, Synthetic construct
  REGION 1..274: note = 3xFLAG-SV40 NLS--ZFP-SV40-NLS-KRAB fusion (AA Sequence)
MAPKKKRKVGRVPAAMAERPFQCRICMRNFSNPANLTRHIRTHTGEKPFACDICGRKFAQNATRTKHTKIHTGSQKPFQCRICMRNFSQSGHLARHIRTHTGEKPFACDICGRKFANRHDRAKHTKIHTGSQKPFQCRICMRNFSRSDHLSEHIRTHTGEKPFACDICGRKFAQRRSRYKHTKIHLRQKDAARGSGPKKKRKVNGGGGSRTLVTFKDVFVDFTREEWKLLDTAQQIVYRNVMLENYKNLVSLGYQLTKPDVILRLEKGEEPWLV

SEQ ID NO: 952 - protein, 274 aa, Synthetic construct
  REGION 1..274: note = 3xFLAG-SV40 NLS--ZFP-SV40-NLS-KRAB fusion (AA Sequence)
MAPKKKRKVGRVPAAMAERPFQCRICMRNFSQSSDLSRHIRTHTGEKPFACDICGRKFAHRSTRNRHTKIHTGSQKPFQCRICMRNFSRSDVLSAHIRTHTGEKPFACDICGRKFADSRTRKNHTKIHTGSQKPFQCRICMRNFSQSGSLTRHIRTHTGEKPFACDICGRKFADQSGLAHHTKIHLRQKDAARGSGPKKKRKVNGGGGSRTLVTFKDVFVDFTREEWKLLDTAQQIVYRNVMLENYKNLVSLGYQLTKPDVILRLEKGEEPWLV

SEQ ID NO: 953 - protein, 274 aa, Synthetic construct
  REGION 1..274: note = 3xFLAG-SV40 NLS--ZFP-SV40-NLS-KRAB fusion (AA Sequence)
MAPKKKRKVGRVPAAMAERPFQCRICMRNFSQNPAQWRHIRTHTGEKPFACDICGRKFARSADLSRHTKIHTGSQKPFQCRICMRNFSTSGSLSRHIRTHTGEKPFACDICGRKFARSDHLSRHTKIHTGSQKPFQCRICMRNFSRSDSLLRHIRTHTGEKPFACDICGRKFAQSYDRFQHTKIHLRQKDAARGSGPKKKRKVNGGGGSRTLVTFKDVFVDFTREEWKLLDTAQQIVYRNVMLENYKNLVSLGYQLTKPDVILRLEKGEEPWLV

SEQ ID NO: 954 - protein, 274 aa, Synthetic construct
  REGION 1..274: note = 3xFLAG-SV40 NLS--ZFP-SV40-NLS-KRAB fusion (AA Sequence)
MAPKKKRKVGRVPAAMAERPFQCRICMRNFSTSGSLSRHIRTHTGEKPFACDICGRKFARSDHLSRHTKIHTGSQKPFQCRICMRNFSRSDSLLRHIRTHTGEKPFACDICGRKFAQSYDRFQHTKIHTGSQKPFQCRICMRNFSRSDNLSTHIRTHTGEKPFACDICGRKFADNRDRIKHTKIHLRQKDAARGSGPKKKRKVNGGGGSRTLVTFKDVFVDFTREEWKLLDTAQQIVYRNVMLENYKNLVSLGYQLTKPDVILRLEKGEEPWLV

SEQ ID NO: 955 - protein, 274 aa, Synthetic construct
  REGION 1..274: note = 3xFLAG-SV40 NLS--ZFP-SV40-NLS-KRAB fusion (AA Sequence)
MAPKKKRKVGRVPAAMAERPFQCRICMRNFSDRSNLSRHIRTHTGEKPFACDICGRKFALRQNLIMHTKIHTGSQKPFQCRICMRNFSERGTLARHIRTHTGEKPFACDICGRKFARSDALTQHTKIHTGSQKPFQCRICMRNFSRSDSLSQHIRTHTGEKPFACDICGRKFARKADRTRHTKIHLRQKDAARGSGPKKKRKVNGGGGSRTLVTFKDVFVDFTREEWKLLDTAQQIVYRNVMLENYKNLVSLGYQLTKPDVILRLEKGEEPWLV

SEQ ID NO: 956 - protein, 274 aa, Synthetic construct
  REGION 1..274: note = 3xFLAG-SV40 NLS--ZFP-SV40-NLS-KRAB fusion (AA Sequence)
MAPKKKRKVGRVPAAMAERPFQCRICMRNFSQYCCLTNHIRTHTGEKPFACDICGRKFATSGNLTRHTKIHTGSQKPFQCRICMRNFSQSSDLSRHIRTHTGEKPFACDICGRKFAFRYYLKRHTKIHTGSQKPFQCRICMRNFSQSGDLTRHIRTHTGEKPFACDICGRKFADKGNLTKHTKIHLRQKDAARGSGPKKKRKVNGGGGSRTLVTFKDVFVDFTREEWKLLDTAQQIVYRNVMLENYKNLVSLGYQLTKPDVILRLEKGEEPWLV

SEQ ID NO: 957 - protein, 274 aa, Synthetic construct
  REGION 1..274: note = 3xFLAG-SV40 NLS--ZFP-SV40-NLS-KRAB fusion (AA Sequence)
MAPKKKRKVGRVPAAMAERPFQCRICMRNFSTSGSLSRHIRTHTGEKPFACDICGRKFARSDNLTTHTKIHTGSQKPFQCRICMRNFSQSGNLARHIRTHTGEKPFACDICGRKFADRTTLMRHTKIHTGSQKPFQCRICMRNFSQSGHLARHIRTHTGEKPFACDICGRKFAQLTHLNSHTKIHLRQKDAARGSGPKKKRKVNGGGGSRTLVTFKDVFVDFTREEWKLLDTAQQIVYRNVMLENYKNLVSLGYQLTKPDVILRLEKGEEPWLV

SEQ ID NO: 958 - protein, 274 aa, Synthetic construct
  REGION 1..274: note = 3xFLAG-SV40 NLS--ZFP-SV40-NLS-KRAB fusion (AA Sequence)
MAPKKKRKVGRVPAAMAERPFQCRICMRNFSIKHDLHRHIRTHTGEKPFACDICGRKFARSANLTRHTKIHTGSQKPFQCRICMRNFSRSDNLARHIRTHTGEKPFACDICGRKFAQNVSRPRHTKIHTGSQKPFQCRICMRNFSRSDDLSKHIRTHTGEKPFACDICGRKFADSSHRTRHTKIHLRQKDAARGSGPKKKRKVNGGGGSRTLVTFKDVFVDFTREEWKLLDTAQQIVYRNVMLENYKNLVSLGYQLTKPDVILRLEKGEEPWLV

SEQ ID NO: 959 - protein, 274 aa, Synthetic construct
  REGION 1..274: note = 3xFLAG-SV40 NLS--ZFP-SV40-NLS-KRAB fusion (AA Sequence)
MAPKKKRKVGRVPAAMAERPFQCRICMRNFSRSDNLARHIRTHTGEKPFACDICGRKFAQNVSRPRHTKIHTGSQKPFQCRICMRNFSRSDDLSKHIRTHTGEKPFACDICGRKFADSSHRTRHTKIHTGSQKPFQCRICMRNFSTSSNRKTHIRTHTGEKPFACDICGRKFAAQWTRACHTKIHLRQKDAARGSGPKKKRKVNGGGGSRTLVTFKDVFVDFTREEWKLLDTAQQIVYRNVMLENYKNLVSLGYQLTKPDVILRLEKGEEPWLV

SEQ ID NO: 960 - protein, 274 aa, Synthetic construct
  REGION 1..274: note = 3xFLAG-SV40 NLS--ZFP-SV40-NLS-KRAB fusion (AA Sequence)
MAPKKKRKVGRVPAAMAERPFQCRICMRNFSRSDDLSKHIRTHTGEKPFACDICGRKFADSSHRTRHTKIHTGSQKPFQCRICMRNFSTSSNRKTHIRTHTGEKPFACDICGRKFAAQWTRACHTKIHTGSQKPFQCRICMRNFSRKQTRTTHIRTHTGEKPFACDICGRKFAHRSSLRRHTKIHLRQKDAARGSGPKKKRKVNGGGGSRTLVTFKDVFVDFTREEWKLLDTAQQIVYRNVMLENYKNLVSLGYQLTKPDVILRLEKGEEPWLV

SEQ ID NO: 961 - protein, 274 aa, Synthetic construct
  REGION 1..274: note = 3xFLAG-SV40 NLS--ZFP-SV40-NLS-KRAB fusion (AA Sequence)
MAPKKKRKVGRVPAAMAERPFQCRICMRNFSQSAHRKNHIRTHTGEKPFACDICGRKFATSSNRKTHTKIHTGSQKPFQCRICMRNFSRSDNLSAHIRTHTGEKPFACDICGRKFARNNDRKTHTKIHTGSQKPFQCRICMRNFSTSGSLSRHIRTHTGEKPFACDICGRKFAQAGHLAKHTKIHLRQKDAARGSGPKKKRKVNGGGGSRTLVTFKDVFVDFTREEWKLLDTAQQIVYRNVMLENYKNLVSLGYQLTKPDVILRLEKGEEPWLV

SEQ ID NO: 962 - protein, 274 aa, Synthetic construct
  REGION 1..274: note = 3xFLAG-SV40 NLS--ZFP-SV40-NLS-KRAB fusion (AA Sequence)
MAPKKKRKVGRVPAAMAERPFQCRICMRNFSRSDHLSQHIRTHTGEKPFACDICGRKFAASSTRTKHTKIHTGSQKPFQCRICMRNFSRSDDLTRHIRTHTGEKPFACDICGRKFAQKSNLSSHTKIHTGSQKPFQCRICMRNFSQSANRTTHIRTHTGEKPFACDICGRKFAQNATRTKHTKIHLRQKDAARGSGPKKKRKVNGGGGSRTLVTFKDVFVDFTREEWKLLDTAQQIVYRNVMLENYKNLVSLGYQLTKPDVILRLEKGEEPWLV

SEQ ID NO: 963 - protein, 274 aa, Synthetic construct
  REGION 1..274: note = 3xFLAG-SV40 NLS--ZFP-SV40-NLS-KRAB fusion (AA Sequence)
MAPKKKRKVGRVPAAMAERPFQCRICMRNFSRSDTLSEHIRTHTGEKPFACDICGRKFARRWTLVGHTKIHTGSQKPFQCRICMRNFSDRSNLSRHIRTHTGEKPFACDICGRKFAQSGDLTRHTKIHTGSQKPFQCRICMRNFSQSSDLSRHIRTHTGEKPFACDICGRKFAYHWYLKKHTKIHLRQKDAARGSGPKKKRKVNGGGGSRTLVTFKDVFVDFTREEWKLLDTAQQIVYRNVMLENYKNLVSLGYQLTKPDVILRLEKGEEPWLV

SEQ ID NO: 964 - protein, 274 aa, Synthetic construct
  REGION 1..274: note = 3xFLAG-SV40 NLS--ZFP-SV40-NLS-KRAB fusion (AA Sequence)
MAPKKKRKVGRVPAAMAERPFQCRICMRNFSRSANLARHIRTHTGEKPFACDICGRKFARSDNLREHTKIHTGSQKPFQCRICMRNFSRPYTLRLHIRTHTGEKPFACDICGRKFAHRSNLNKHTKIHTGSQKPFQCRICMRNFSQSGSLTRHIRTHTGEKPFACDICGRKFATSANLSRHTKIHLRQKDAARGSGPKKKRKVNGGGGSRTLVTFKDVFVDFTREEWKLLDTAQQIVYRNVMLENYKNLVSLGYQLTKPDVILRLEKGEEPWLV

SEQ ID NO: 965 - protein, 270 aa, Synthetic construct
  REGION 1..270: note = 3xFLAG-SV40 NLS--ZFP-SV40-NLS-KRAB fusion (AA Sequence)
MAPKKKRKVGRVPLEPGEKPYACPECGKSFSRSDDLVRHQRTHTGEKPYKCPECGKSFSTSGSLVRHQRTHTGEKPYKCPECGKSFSRSDKLVRHQRTHTGEKPYACPECGKSFSRSDELVRHQRTHTGEKPYKCPECGKSFSTSHSLTEHQRTHTGEKPYKCPECGKSFSRADNLTEHQRTHTGKKTSGSGPKKKRKVNGGGGSRTLVTFKDVFVDFTREEWKLLDTAQQIVYRNVMLENYKNLVSLGYQLTKPDVILRLEKGEEPWLV

SEQ ID NO: 966 - protein, 270 aa, Synthetic construct
  REGION 1..270: note = 3xFLAG-SV40 NLS--ZFP-SV40-NLS-KRAB fusion (AA Sequence)
MAPKKKRKVGRVPLEPGEKPYACPECGKSFSERSHLREHQRTHTGEKPYKCPECGKSFSTSHSLTEHQRTHTGEKPYKCPECGKSFSQAGHLASHQRTHTGEKPYACPECGKSFSTSHSLTEHQRTHTGEKPYKCPECGKSFSDPGHLVRHQRTHTGEKPYKCPECGKSFSTSGNLVRHQRTHTGKKTSGSGPKKKRKVNGGGGSRTLVTFKDVFVDFTREEWKLLDTAQQIVYRNVMLENYKNLVSLGYQLTKPDVILRLEKGEEPWLV

SEQ ID NO: 967 - protein, 270 aa, Synthetic construct
  REGION 1..270: note = 3xFLAG-SV40 NLS--ZFP-SV40-NLS-KRAB fusion (AA Sequence)
MAPKKKRKVGRVPLEPGEKPYKCPECGKSFSRADNLTEHQRTHTGEKPYKCPECGKSFSTSGSLVRHQRTHTGEKPYKCPECGKSFSRKDNLKNHQRTHTGEKPYKCPECGKSFSQSSSLVRHQRTHTGEKPYKCPECGKSFSRSDKLVRHQRTHTGEKPYKCPECGKSFSDSGNLRVHQRTHTGKKTSGSGPKKKRKVNGGGGSRTLVTFKDVFVDFTREEWKLLDTAQQIVYRNVMLENYKNLVSLGYQLTKPDVILRLEKGEEPWLV

SEQ ID NO: 968 - protein, 270 aa, Synthetic construct
  REGION 1..270: note = 3xFLAG-SV40 NLS--ZFP-SV40-NLS-KRAB fusion (AA Sequence)
MAPKKKRKVGRVPLEPGEKPYACPECGKSFSQSSSLVRHQRTHTGEKPYKCPECGKSFSQSGDLRRHQRTHTGEKPYKCPECGKSFSRSDERKRHQRTHTGEKPYACPECGKSFSHRTTLTNHQRTHTGEKPYKCPECGKSFSRSDHLTNHQRTHTGEKPYKCPECGKSFSTSGELVRHQRTHTGKKTSGSGPKKKRKVNGGGGSRTLVTFKDVFVDFTREEWKLLDTAQQIVYRNVMLENYKNLVSLGYQLTKPDVILRLEKGEEPWLV

SEQ ID NO: 969 - protein, 270 aa, Synthetic construct
  REGION 1..270: note = 3xFLAG-SV40 NLS--ZFP-SV40-NLS-KRAB fusion (AA Sequence)
MAPKKKRKVGRVPLEPGEKPYACPECGKSFSQSGDLRRHQRTHTGEKPYKCPECGKSFSRSDERKRHQRTHTGEKPYKCPECGKSFSHRTTLTNHQRTHTGEKPYACPECGKSFSRSDHLTNHQRTHTGEKPYKCPECGKSFSTSGELVRHQRTHTGEKPYKCPECGKSFSRSDDLVRHQRTHTGKKTSGSGPKKKRKVNGGGGSRTLVTFKDVFVDFTREEWKLLDTAQQIVYRNVMLENYKNLVSLGYQLTKPDVILRLEKGEEPWLV

SEQ ID NO: 970 - protein, 270 aa, Synthetic construct
  REGION 1..270: note = 3xFLAG-SV40 NLS--ZFP-SV40-NLS-KRAB fusion (AA Sequence)
MAPKKKRKVGRVPLEPGEKPYACPECGKSFSQRAHLERHQRTHTGEKPYKCPECGKSFSQLAHLRAHQRTHTGEKPYKCPECGKSFSDPGHLVRHQRTHTGEKPYACPECGKSFSRRSACRRHQRTHTGEKPYKCPECGKSFSRSDHLTTHQRTHTGEKPYKCPECGKSFSQSSSLVRHQRTHTGKKTSGSGPKKKRKVNGGGGSRTLVTFKDVFVDFTREEWKLLDTAQQIVYRNVMLENYKNLVSLGYQLTKPDVILRLEKGEEPWLV

SEQ ID NO: 971 - protein, 270 aa, Synthetic construct
  REGION 1..270: note = 3xFLAG-SV40 NLS--ZFP-SV40-NLS-KRAB fusion (AA Sequence)
MAPKKKRKVGRVPLEPGEKPYACPECGKSFSQSSNLVRHQRTHTGEKPYKCPECGKSFSRSDDLVRHQRTHTGEKPYKCPECGKSFSTHLDLIRHQRTHTGEKPYACPECGKSFSTSGNLTEHQRTHTGEKPYKCPECGKSFSRRSACRRHQRTHTGEKPYKCPECGKSFSRNDTLTEHQRTHTGKKTSGSGPKKKRKVNGGGGSRTLVTFKDVFVDFTREEWKLLDTAQQIVYRNVMLENYKNLVSLGYQLTKPDVILRLEKGEEPWLV

SEQ ID NO: 972 - DNA, 2690 bp, Synthetic construct
  misc_feature 1..2690: note = 3xFLAG-DNMT3AL-XTEN80-SV40 NLS-ZFP-SV40 NLS-KRAB (DNA sequence)
  source 1..2690: mol_type = other DNA
atgcacgatcaggagtttgacccccctaaggtgtacccacccgtgccagccgagaagaggaagcccatccgcgtgctgtccctgttcgacggcatcgccacaggcctgctggtgctgaaggatctgggcatccaggtggacagatatatcgcctccgaggtgtgcgaggattctatcaccgtgggcatggtgaggcaccagggcaagatcatgtacgtgggcgacgtgcgcagcgtgacacagaagcacatccaggagtggggacccttcgacctggtcatcggaggcagcccctgtaatgacctgtccatcgtgaaccctgcaaggaagggcctgtatgagggaaccggcagactgttctttgagttctacaggctgctgcacgacgcccgccctaaggagggcgatgacaggccattcttttggctgtttgagaacgtggtggccatgggcgtgagcgacaagcgggatatctccagattcctggagtctaatcccgtgatgatcgatgcaaaggaggtgtctgccgcacacagggcaaggtacttttggggaaatctgcctggcatgaaccgcccactggccagcaccgtgaacgacaagctggagctgcaggagtgcctggagcacggaaggatcgccaagttctccaaggtgcggacaatcaccacaagatctaacagcatcaagcagggcaaggatcagcacttccccgtgttcatgaatgagaaggaggacatcctgtggtgtaccgagatggagcgcgtgttcggctttccagtgcactatacagacgtgagcaatatgagccggctggcaaggcagagactgctgggccggtcctggtctgtgccagtgatcagacacctgttcgcccccctgaaggagtactttgcctgcgtgtctagcggcaactctaatgccaacagcagaggcccttccttttcctctggcctggtgccactgtctctgaggggcagccacatgggccccatggagatctacaagaccgtgtccgcctggaagaggcagcctgtgcgcgtgctgtctctgttccgcaacatcgacaaggtgctgaagagcctgggctttctggagagcggatccggatctggaggaggcaccctgaagtatgtggaggatgtgacaaatgtggtgcggagagatgtggagaagtggggccccttcgatctggtgtacggatccacccagccactgggaagctcctgcgataggtgtccaggatggtatatgttccagtttcacagaatcctgcagtacgcactgccaaggcaggagagccagcgccctttcttttggatctttatggacaacctgctgctgacagaggatgaccaggagacaacaacccgcttcctgcagacagaggcagtgaccctgcaggatgtgaggggacgcgactatcagaatgccatgcgggtgtggtctaacatccctggcctgaagagcaagcacgcccccctgacccctaaggaggaggagtacctgcaggcccaggtgcggagcagatccaagctggatgcccctaaggtggacctgctggtgaagaattgtctgctgccactgcgggagtacttcaagtactttagtcagaatagcctgccactgggtggacctagctctggagccccgcctccgtcaggtggatctcctgcaggtagcccaacttccacggaagagggcacgtctgagagtgcgactcctgagagcgggcctggcacaagtactgagcccagcgaaggttctgcacccgggtctccagctgggagccctacctcaacagaggaaggtaccagcacagagccttctgagggtagcgctcctggcacgtccaccgaaccgtccgaggggatggcaccgaagaaaaaacgcaaagttggtcgagctgctatggcagagcggccatttcagtgtcgaatttgcatgcgaaatttctctagcgaagcggatcgaagtagacatatccggacccatacgggtgagaaaccgttcgcgtgtgatatatgcggtcgcaaattcgcagaccgctccaacctgacaaggcacacaaaaattcatactggaagccagaaaccgtttcagtgccggatttgtatgcgcaatttctctcaatcctccgatctctcccgccacatcaggactcataccggggagaaaccctttgcttgtgacatttgtggcagaaagtttgcctatcactggtaccttaagaagcacaccaagatccatactggctctcaaaagcctttccaatgccgaatatgtatgcgaaacttttctaggtctgactccctctctgtacatatccgcactcacacgggtgaaaaaccatttgcctgtgacatatgtggcagaaaatttgctcaaaatgcgaaccgaaaaacgcatacgaaaatccatttgcgacaaaaagatgcagctcgggctccggaccgaaaaaaaagagaaaggtaaacggcgggggaggatcacggaccctggttacatttaaggacgtttttgtagacttcacgagggaggaatggaagctgttggacaccgcccagcaaatcgtgtatcgaaatgtaatgttggaaaattataaaaatctggtttccctcggctaccaattgacaaaaccagacgtcatcctcagactggaaaaaggggaagaaccttggcttgtctga

SEQ ID NO: 973 - DNA, 2690 bp, Synthetic construct
  misc_feature 1..2690: note = 3xFLAG-DNMT3AL-XTEN80-SV40 NLS-ZFP-SV40 NLS-KRAB (DNA sequence)
  source 1..2690: mol_type = other DNA
atgcacgatcaggagtttgacccccctaaggtgtacccacccgtgccagccgagaagaggaagcccatccgcgtgctgtccctgttcgacggcatcgccacaggcctgctggtgctgaaggatctgggcatccaggtggacagatatatcgcctccgaggtgtgcgaggattctatcaccgtgggcatggtgaggcaccagggcaagatcatgtacgtgggcgacgtgcgcagcgtgacacagaagcacatccaggagtggggacccttcgacctggtcatcggaggcagcccctgtaatgacctgtccatcgtgaaccctgcaaggaagggcctgtatgagggaaccggcagactgttctttgagttctacaggctgctgcacgacgcccgccctaaggagggcgatgacaggccattcttttggctgtttgagaacgtggtggccatgggcgtgagcgacaagcgggatatctccagattcctggagtctaatcccgtgatgatcgatgcaaaggaggtgtctgccgcacacagggcaaggtacttttggggaaatctgcctggcatgaaccgcccactggccagcaccgtgaacgacaagctggagctgcaggagtgcctggagcacggaaggatcgccaagttctccaaggtgcggacaatcaccacaagatctaacagcatcaagcagggcaaggatcagcacttccccgtgttcatgaatgagaaggaggacatcctgtggtgtaccgagatggagcgcgtgttcggctttccagtgcactatacagacgtgagcaatatgagccggctggcaaggcagagactgctgggccggtcctggtctgtgccagtgatcagacacctgttcgcccccctgaaggagtactttgcctgcgtgtctagcggcaactctaatgccaacagcagaggcccttccttttcctctggcctggtgccactgtctctgaggggcagccacatgggccccatggagatctacaagaccgtgtccgcctggaagaggcagcctgtgcgcgtgctgtctctgttccgcaacatcgacaaggtgctgaagagcctgggctttctggagagcggatccggatctggaggaggcaccctgaagtatgtggaggatgtgacaaatgtggtgcggagagatgtggagaagtggggccccttcgatctggtgtacggatccacccagccactgggaagctcctgcgataggtgtccaggatggtatatgttccagtttcacagaatcctgcagtacgcactgccaaggcaggagagccagcgccctttcttttggatctttatggacaacctgctgctgacagaggatgaccaggagacaacaacccgcttcctgcagacagaggcagtgaccctgcaggatgtgaggggacgcgactatcagaatgccatgcgggtgtggtctaacatccctggcctgaagagcaagcacgcccccctgacccctaaggaggaggagtacctgcaggcccaggtgcggagcagatccaagctggatgcccctaaggtggacctgctggtgaagaattgtctgctgccactgcgggagtacttcaagtactttagtcagaatagcctgccactgggtggacctagctctggagccccgcctccgtcaggtggatctcctgcaggtagcccaacttccacggaagagggcacgtctgagagtgcgactcctgagagcgggcctggcacaagtactgagcccagcgaaggttctgcacccgggtctccagctgggagccctacctcaacagaggaaggtaccagcacagagccttctgagggtagcgctcctggcacgtccaccgaaccgtccgaggggatggcaccgaagaaaaaacgcaaagttggtcgagcggcaatggcagaacgcccgtttcagtgtagaatctgcatgcgcaatttctccagaagtgacgtactcagcacgcatatcagaacacatactggtgaaaaaccgtttgcttgtgatatctgtggtaagaaattcgcggataactcctcaaggacgcggcatacgaagatccacactggttctcaaaagccgttccagtgccggatatgcatgcggaactttagtcggccatatacgcttcgacttcatattaggactcacaccggcgaaaagccgttcgcctgtgacatttgcgggagaaaattcgctgactctagtcaccgcacgaggcacactaaaatacatactggttcacaaaaaccattccagtgccgaatttgcatgcgaaatttttcccgaagtgaccatctctcacagcacatccgcacccatacaggggagaagcccttcgcttgtgatatatgcggacgcaagttcgcggacagctcacaccggacccgccatacaaagatccacttgagacagaaagatgcagcgcgggctccggaccgaaaaaaaagagaaaggtaaacggcgggggaggatcacggaccctggttacatttaaggacgtttttgtagacttcacgagggaggaatggaagctgttggacaccgcccagcaaatcgtgtatcgaaatgtaatgttggaaaattataaaaatctggtttccctcggctaccaattgacaaaaccagacgtcatcctcagactggaaaaaggggaagaaccttggcttgtctga

SEQ ID NO: 974 - DNA, 2690 bp, Synthetic construct
  misc_feature 1..2690: note = 3xFLAG-DNMT3AL-XTEN80-SV40 NLS-ZFP-SV40 NLS-KRAB (DNA sequence)
  source 1..2690: mol_type = other DNA
atgcacgatcaggagtttgacccccctaaggtgtacccacccgtgccagccgagaagaggaagcccatccgcgtgctgtccctgttcgacggcatcgccacaggcctgctggtgctgaaggatctgggcatccaggtggacagatatatcgcctccgaggtgtgcgaggattctatcaccgtgggcatggtgaggcaccagggcaagatcatgtacgtgggcgacgtgcgcagcgtgacacagaagcacatccaggagtggggacccttcgacctggtcatcggaggcagcccctgtaatgacctgtccatcgtgaaccctgcaaggaagggcctgtatgagggaaccggcagactgttctttgagttctacaggctgctgcacgacgcccgccctaaggagggcgatgacaggccattcttttggctgtttgagaacgtggtggccatgggcgtgagcgacaagcgggatatctccagattcctggagtctaatcccgtgatgatcgatgcaaaggaggtgtctgccgcacacagggcaaggtacttttggggaaatctgcctggcatgaaccgcccactggccagcaccgtgaacgacaagctggagctgcaggagtgcctggagcacggaaggatcgccaagttctccaaggtgcggacaatcaccacaagatctaacagcatcaagcagggcaaggatcagcacttccccgtgttcatgaatgagaaggaggacatcctgtggtgtaccgagatggagcgcgtgttcggctttccagtgcactatacagacgtgagcaatatgagccggctggcaaggcagagactgctgggccggtcctggtctgtgccagtgatcagacacctgttcgcccccctgaaggagtactttgcctgcgtgtctagcggcaactctaatgccaacagcagaggcccttccttttcctctggcctggtgccactgtctctgaggggcagccacatgggccccatggagatctacaagaccgtgtccgcctggaagaggcagcctgtgcgcgtgctgtctctgttccgcaacatcgacaaggtgctgaagagcctgggctttctggagagcggatccggatctggaggaggcaccctgaagtatgtggaggatgtgacaaatgtggtgcggagagatgtggagaagtggggccccttcgatctggtgtacggatccacccagccactgggaagctcctgcgataggtgtccaggatggtatatgttccagtttcacagaatcctgcagtacgcactgccaaggcaggagagccagcgccctttcttttggatctttatggacaacctgctgctgacagaggatgaccaggagacaacaacccgcttcctgcagacagaggcagtgaccctgcaggatgtgaggggacgcgactatcagaatgccatgcgggtgtggtctaacatccctggcctgaagagcaagcacgcccccctgacccctaaggaggaggagtacctgcaggcccaggtgcggagcagatccaagctggatgcccctaaggtggacctgctggtgaagaattgtctgctgccactgcgggagtacttcaagtactttagtcagaatagcctgccactgggtggacctagctctggagccccgcctccgtcaggtggatctcctgcaggtagcccaacttccacggaagagggcacgtctgagagtgcgactcctgagagcgggcctggcacaagtactgagcccagcgaaggttctgcacccgggtctccagctgggagccctacctcaacagaggaaggtaccagcacagagccttctgagggtagcgctcctggcacgtccaccgaaccgtccgaggggatggcaccgaagaaaaaacgcaaagttggtcgagccgcaatggccgaaagaccatttcagtgcaggatatgtatgcgcaacttctctcgcagtgaccacctgagtcaacatatcaggacacacacgggtgaaaagccttttgcatgcgatatttgtggtcgaaaatttgctcagtctgcggaccgaaccaagcacactaaaattcataccggctcacagaaaccgtttcaatgccgcatctgtatgaggaatttctctagatcagaccacttgtcccaacacatccggactcatactggagaaaagccgtttgcatgtgacatttgtggcaggaagtttgctagaaggtctgaccttaaaaggcacacaaaaattcatacgggttcccagaaaccatttcagtgccggatatgcatgcggaacttttcacgaagcgaccacctctcccgacatattcgaacgcacactggtgagaagccgtttgcttgcgacatttgcggacgcaagttcgctcagagctccgacttgaggaggcataccaagattcatctccggcagaaagatgccgcgcgggctccggaccgaaaaaaaagagaaaggtaaacggcgggggaggatcacggaccctggttacatttaaggacgtttttgtagacttcacgagggaggaatggaagctgttggacaccgcccagcaaatcgtgtatcgaaatgtaatgttggaaaattataaaaatctggtttccctcggctaccaattgacaaaaccagacgtcatcctcagactggaaaaaggggaagaaccttggcttgtctga

SEQ ID NO: 975 - DNA, 2690 bp, Synthetic construct
  misc_feature 1..2690: note = 3xFLAG-DNMT3AL-XTEN80-SV40 NLS-ZFP-SV40 NLS-KRAB (DNA sequence)
  source 1..2690: mol_type = other DNA
atgcacgatcaggagtttgacccccctaaggtgtacccacccgtgccagccgagaagaggaagcccatccgcgtgctgtccctgttcgacggcatcgccacaggcctgctggtgctgaaggatctgggcatccaggtggacagatatatcgcctccgaggtgtgcgaggattctatcaccgtgggcatggtgaggcaccagggcaagatcatgtacgtgggcgacgtgcgcagcgtgacacagaagcacatccaggagtggggacccttcgacctggtcatcggaggcagcccctgtaatgacctgtccatcgtgaaccctgcaaggaagggcctgtatgagggaaccggcagactgttctttgagttctacaggctgctgcacgacgcccgccctaaggagggcgatgacaggccattcttttggctgtttgagaacgtggtggccatgggcgtgagcgacaagcgggatatctccagattcctggagtctaatcccgtgatgatcgatgcaaaggaggtgtctgccgcacacagggcaaggtacttttggggaaatctgcctggcatgaaccgcccactggccagcaccgtgaacgacaagctggagctgcaggagtgcctggagcacggaaggatcgccaagttctccaaggtgcggacaatcaccacaagatctaacagcatcaagcagggcaaggatcagcacttccccgtgttcatgaatgagaaggaggacatcctgtggtgtaccgagatggagcgcgtgttcggctttccagtgcactatacagacgtgagcaatatgagccggctggcaaggcagagactgctgggccggtcctggtctgtgccagtgatcagacacctgttcgcccccctgaaggagtactttgcctgcgtgtctagcggcaactctaatgccaacagcagaggcccttccttttcctctggcctggtgccactgtctctgaggggcagccacatgggccccatggagatctacaagaccgtgtccgcctggaagaggcagcctgtgcgcgtgctgtctctgttccgcaacatcgacaaggtgctgaagagcctgggctttctggagagcggatccggatctggaggaggcaccctgaagtatgtggaggatgtgacaaatgtggtgcggagagatgtggagaagtggggccccttcgatctggtgtacggatccacccagccactgggaagctcctgcgataggtgtccaggatggtatatgttccagtttcacagaatcctgcagtacgcactgccaaggcaggagagccagcgccctttcttttggatctttatggacaacctgctgctgacagaggatgaccaggagacaacaacccgcttcctgcagacagaggcagtgaccctgcaggatgtgaggggacgcgactatcagaatgccatgcgggtgtggtctaacatccctggcctgaagagcaagcacgcccccctgacccctaaggaggaggagtacctgcaggcccaggtgcggagcagatccaagctggatgcccctaaggtggacctgctggtgaagaattgtctgctgccactgcgggagtacttcaagtactttagtcagaatagcctgccactgggtggacctagctctggagccccgcctccgtcaggtggatctcctgcaggtagcccaacttccacggaagagggcacgtctgagagtgcgactcctgagagcgggcctggcacaagtactgagcccagcgaaggttctgcacccgggtctccagctgggagccctacctcaacagaggaaggtaccagcacagagccttctgagggtagcgctcctggcacgtccaccgaaccgtccgaggggatggcaccgaagaaaaaacgcaaagttggtcgagccgcgatggctgagagaccatttcagtgtcgaatctgcatgagaaatttttcaaggagtgacaatctgtctgagcacatacgaacacatactggggaaaaaccctttgcatgtgacatttgtggaagaaagtttgctaccagctcaaatcgcaaaacacatacaaagatacataccggctcccaaaagccattccagtgccgcatctgcatgaggaacttttccgatcgctcacatcttacccgccacataagaactcacacaggcgaaaagccctttgcctgcgatatatgcggacggaagttcgcccgctccgacgctttgacccagcataccaaaatccatactgggtctcaaaagccatttcagtgccgaatctgtatgaggaatttctccgacaggtcagcattggcacggcatatccgcacccataccggtgagaagccttttgcttgcgatatctgtggacgaaaatttgcccggaggttcactctctccaaacacacaaagatacatctgcgccaaaaggatgcagcccgggctccggaccgaaaaaaaagagaaaggtaaacggcgggggaggatcacggaccctggttacatttaaggacgtttttgtagacttcacgagggaggaatggaagctgttggacaccgcccagcaaatcgtgtatcgaaatgtaatgttggaaaattataaaaatctggtttccctcggctaccaattgacaaaaccagacgtcatcctcagactggaaaaaggggaagaaccttggcttgtctga

SEQ ID NO: 976 - DNA, 2690 bp, Synthetic construct
  misc_feature 1..2690: note = 3xFLAG-DNMT3AL-XTEN80-SV40 NLS-ZFP-SV40 NLS-KRAB (DNA sequence)
  source 1..2690: mol_type = other DNA
atgcacgatcaggagtttgacccccctaaggtgtacccacccgtgccagccgagaagaggaagcccatccgcgtgctgtccctgttcgacggcatcgccacaggcctgctggtgctgaaggatctgggcatccaggtggacagatatatcgcctccgaggtgtgcgaggattctatcaccgtgggcatggtgaggcaccagggcaagatcatgtacgtgggcgacgtgcgcagcgtgacacagaagcacatccaggagtggggacccttcgacctggtcatcggaggcagcccctgtaatgacctgtccatcgtgaaccctgcaaggaagggcctgtatgagggaaccggcagactgttctttgagttctacaggctgctgcacgacgcccgccctaaggagggcgatgacaggccattcttttggctgtttgagaacgtggtggccatgggcgtgagcgacaagcgggatatctccagattcctggagtctaatcccgtgatgatcgatgcaaaggaggtgtctgccgcacacagggcaaggtacttttggggaaatctgcctggcatgaaccgcccactggccagcaccgtgaacgacaagctggagctgcaggagtgcctggagcacggaaggatcgccaagttctccaaggtgcggacaatcaccacaagatctaacagcatcaagcagggcaaggatcagcacttccccgtgttcatgaatgagaaggaggacatcctgtggtgtaccgagatggagcgcgtgttcggctttccagtgcactatacagacgtgagcaatatgagccggctggcaaggcagagactgctgggccggtcctggtctgtgccagtgatcagacacctgttcgcccccctgaaggagtactttgcctgcgtgtctagcggcaactctaatgccaacagcagaggcccttccttttcctctggcctggtgccactgtctctgaggggcagccacatgggccccatggagatctacaagaccgtgtccgcctggaagaggcagcctgtgcgcgtgctgtctctgttccgcaacatcgacaaggtgctgaagagcctgggctttctggagagcggatccggatctggaggaggcaccctgaagtatgtggaggatgtgacaaatgtggtgcggagagatgtggagaagtggggccccttcgatctggtgtacggatccacccagccactgggaagctcctgcgataggtgtccaggatggtatatgttccagtttcacagaatcctgcagtacgcactgccaaggcaggagagccagcgccctttcttttggatctttatggacaacctgctgctgacagaggatgaccaggagacaacaacccgcttcctgcagacagaggcagtgaccctgcaggatgtgaggggacgcgactatcagaatgccatgcgggtgtggtctaacatccctggcctgaagagcaagcacgcccccctgacccctaaggaggaggagtacctgcaggcccaggtgcggagcagatccaagctggatgcccctaaggtggacctgctggtgaagaattgtctgctgccactgcgggagtacttcaagtactttagtcagaatagcctgccactgggtggacctagctctggagccccgcctccgtcaggtggatctcctgcaggtagcccaacttccacggaagagggcacgtctgagagtgcgactcctgagagcgggcctggcacaagtactgagcccagcgaaggttctgcacccgggtctccagctgggagccctacctcaacagaggaaggtaccagcacagagccttctgagggtagcgctcctggcacgtccaccgaaccgtccgaggggatggcaccgaagaaaaaacgcaaagttggtcgagccgcaatggctgagcgcccgttccagtgcagaatatgcatgcggaatttttctaggtcagatcatttgtctgagcatattcgcacacacacgggagagaagccctttgcttgcgatatatgtggaaggaaattcgcgcaatacagtgggcgctactaccatacaaagatccatacgggctcccagaagcccttccaatgtcgaatatgtatgaggaattttagtcacggacaaacattgaatgaacatatacgcactcacactggtgaaaaaccatttgcgtgcgatatttgcggaaggaagtttgctcagtctgggaatttggcgcgacacaccaagatccacacaggatcccagaaaccatttcagtgcagaatttgtatgagaaactttagccgcagtgacagtctcttgaggcacatacggactcatactggggagaaaccattcgcctgcgatatttgtggacgaaagttcgcctgtcgcgagtacagaggcaagcacactaagatacatcttaggcaaaaggacgctgcacgggctccggaccgaaaaaaaagagaaaggtaaacggcgggggaggatcacggaccctggttacatttaaggacgtttttgtagacttcacgagggaggaatggaagctgttggacaccgcccagcaaatcgtgtatcgaaatgtaatgttggaaaattataaaaatctggtttccctcggctaccaattgacaaaaccagacgtcatcctcagactggaaaaaggggaagaaccttggcttgtctga

SEQ ID NO: 977 - DNA, 2690 bp, Synthetic construct
  misc_feature 1..2690: note = 3xFLAG-DNMT3AL-XTEN80-SV40 NLS-ZFP-SV40 NLS-KRAB (DNA sequence)
  source 1..2690: mol_type = other DNA
atgcacgatcaggagtttgacccccctaaggtgtacccacccgtgccagccgagaagaggaagcccatccgcgtgctgtccctgttcgacggcatcgccacaggcctgctggtgctgaaggatctgggcatccaggtggacagatatatcgcctccgaggtgtgcgaggattctatcaccgtgggcatggtgaggcaccagggcaagatcatgtacgtgggcgacgtgcgcagcgtgacacagaagcacatccaggagtggggacccttcgacctggtcatcggaggcagcccctgtaatgacctgtccatcgtgaaccctgcaaggaagggcctgtatgagggaaccggcagactgttctttgagttctacaggctgctgcacgacgcccgccctaaggagggcgatgacaggccattcttttggctgtttgagaacgtggtggccatgggcgtgagcgacaagcgggatatctccagattcctggagtctaatcccgtgatgatcgatgcaaaggaggtgtctgccgcacacagggcaaggtacttttggggaaatctgcctggcatgaaccgcccactggccagcaccgtgaacgacaagctggagctgcaggagtgcctggagcacggaaggatcgccaagttctccaaggtgcggacaatcaccacaagatctaacagcatcaagcagggcaaggatcagcacttccccgtgttcatgaatgagaaggaggacatcctgtggtgtaccgagatggagcgcgtgttcggctttccagtgcactatacagacgtgagcaatatgagccggctggcaaggcagagactgctgggccggtcctggtctgtgccagtgatcagacacctgttcgcccccctgaaggagtactttgcctgcgtgtctagcggcaactctaatgccaacagcagaggcccttccttttcctctggcctggtgccactgtctctgaggggcagccacatgggccccatggagatctacaagaccgtgtccgcctggaagaggcagcctgtgcgcgtgctgtctctgttccgcaacatcgacaaggtgctgaagagcctgggctttctggagagcggatccggatctggaggaggcaccctgaagtatgtggaggatgtgacaaatgtggtgcggagagatgtggagaagtggggccccttcgatctggtgtacggatccacccagccactgggaagctcctgcgataggtgtccaggatggtatatgttccagtttcacagaatcctgcagtacgcactgccaaggcaggagagccagcgccctttcttttggatctttatggacaacctgctgctgacagaggatgaccaggagacaacaacccgcttcctgcagacagaggcagtgaccctgcaggatgtgaggggacgcgactatcagaatgccatgcgggtgtggtctaacatccctggcctgaagagcaagcacgcccccctgacccctaaggaggaggagtacctgcaggcccaggtgcggagcagatccaagctggatgcccctaaggtggacctgctggtgaagaattgtctgctgccactgcgggagtacttcaagtactttagtcagaatagcctgccactgggtggacctagctctggagccccgcctccgtcaggtggatctcctgcaggtagcccaacttccacggaagagggcacgtctgagagtgcgactcctgagagcgggcctggcacaagtactgagcccagcgaaggttctgcacccgggtctccagctgggagccctacctcaacagaggaaggtaccagcacagagccttctgagggtagcgctcctggcacgtccaccgaaccgtccgaggggatggcaccgaagaaaaaacgcaaagttggtcgagccgcgatggctgagaggccttttcaatgtcgaatctgtatgaggaacttctctcaatctgctaatcgcacgacgcacattcgaacgcataccggtgagaagccattcgcgtgcgatatctgcggacggaaattcgcgaggtcagctaatcttacacggcacacgaagatccacacagggtcacagaaaccttttcagtgtcgcatttgcatgaggaatttctcccgatctgacgtccttagcgaacatatacgaactcacacgggcgagaagccatttgcgtgcgatatatgcgggaggaagtttgccacctctggacatctgagtcgacataccaaaattcataccggtagtcagaagccgttccaatgcagaatatgtatgcgaaatttctctcaaagctcagacttgtctaggcacataagaacgcacacgggtgaaaaacctttcgcgtgtgatatctgcggcagaaagttcgcacaatggtccacccgaaagcggcatacgaagattcacctcagacagaaagacgctgcccgggctccggaccgaaaaaaaagagaaaggtaaacggcgggggaggatcacggaccctggttacatttaaggacgtttttgtagacttcacgagggaggaatggaagctgttggacaccgcccagcaaatcgtgtatcgaaatgtaatgttggaaaattataaaaatctggtttccctcggctaccaattgacaaaaccagacgtcatcctcagactggaaaaaggggaagaaccttggcttgtctga

SEQ ID NO: 978 - DNA, 2690 bp, Synthetic construct
  misc_feature 1..2690: note = 3xFLAG-DNMT3AL-XTEN80-SV40 NLS-ZFP-SV40 NLS-KRAB (DNA sequence)
  source 1..2690: mol_type = other DNA
atgcacgatcaggagtttgacccccctaaggtgtacccacccgtgccagccgagaagaggaagcccatccgcgtgctgtccctgttcgacggcatcgccacaggcctgctggtgctgaaggatctgggcatccaggtggacagatatatcgcctccgaggtgtgcgaggattctatcaccgtgggcatggtgaggcaccagggcaagatcatgtacgtgggcgacgtgcgcagcgtgacacagaagcacatccaggagtggggacccttcgacctggtcatcggaggcagcccctgtaatgacctgtccatcgtgaaccctgcaaggaagggcctgtatgagggaaccggcagactgttctttgagttctacaggctgctgcacgacgcccgccctaaggagggcgatgacaggccattcttttggctgtttgagaacgtggtggccatgggcgtgagcgacaagcgggatatctccagattcctggagtctaatcccgtgatgatcgatgcaaaggaggtgtctgccgcacacagggcaaggtacttttggggaaatctgcctggcatgaaccgcccactggccagcaccgtgaacgacaagctggagctgcaggagtgcctggagcacggaaggatcgccaagttctccaaggtgcggacaatcaccacaagatctaacagcatcaagcagggcaaggatcagcacttccccgtgttcatgaatgagaaggaggacatcctgtggtgtaccgagatggagcgcgtgttcggctttccagtgcactatacagacgtgagcaatatgagccggctggcaaggcagagactgctgggccggtcctggtctgtgccagtgatcagacacctgttcgcccccctgaaggagtactttgcctgcgtgtctagcggcaactctaatgccaacagcagaggcccttccttttcctctggcctggtgccactgtctctgaggggcagccacatgggccccatggagatctacaagaccgtgtccgcctggaagaggcagcctgtgcgcgtgctgtctctgttccgcaacatcgacaaggtgctgaagagcctgggctttctggagagcggatccggatctggaggaggcaccctgaagtatgtggaggatgtgacaaatgtggtgcggagagatgtggagaagtggggccccttcgatctggtgtacggatccacccagccactgggaagctcctgcgataggtgtccaggatggtatatgttccagtttcacagaatcctgcagtacgcactgccaaggcaggagagccagcgccctttcttttggatctttatggacaacctgctgctgacagaggatgaccaggagacaacaacccgcttcctgcagacagaggcagtgaccctgcaggatgtgaggggacgcgactatcagaatgccatgcgggtgtggtctaacatccctggcctgaagagcaagcacgcccccctgacccctaaggaggaggagtacctgcaggcccaggtgcggagcagatccaagctggatgcccctaaggtggacctgctggtgaagaattgtctgctgccactgcgggagtacttcaagtactttagtcagaatagcctgccactgggtggacctagctctggagccccgcctccgtcaggtggatctcctgcaggtagcccaacttccacggaagagggcacgtctgagagtgcgactcctgagagcgggcctggcacaagtactgagcccagcgaaggttctgcacccgggtctccagctgggagccctacctcaacagaggaaggtaccagcacagagccttctgagggtagcgctcctggcacgtccaccgaaccgtccgaggggatggcaccgaagaaaaaacgcaaagttggtcgagcggcgatggcagaacgcccgttccaatgcagaatatgtatgagaaacttctcccagagcggaaatctggcacgccacatccggacacacacgggagagaagccatttgcttgtgacatttgtggtcgcaaatttgccgccacctgttgtctggcacatcatactaagatacatacggggtcacagaaaccattccaatgtaggatctgcatgcggaatttttctcggtggcagtatttgcctacgcatattagaacccacgccggtgagaaaccgtttgcatgtgacatctgcggacgaaagtttgccgatagatctgcgcttgctaggcatactaaaatccacacggggtcccagaagccttttcagtgtcggatatgtatgaggaacttcagtcgatcagacaaccttagcgagcatattcggacgcatactggagaaaaaccttttgcttgtgatatatgcggtaggaagttcgccaaacggtgtaaccttcgctgtcacaccaaaatacatcttcgccagaaagatgcggcccgggctccggaccgaaaaaaaagagaaaggtaaacggcgggggaggatcacggaccctggttacatttaaggacgtttttgtagacttcacgagggaggaatggaagctgttggacaccgcccagcaaatcgtgtatcgaaatgtaatgttggaaaattataaaaatctggtttccctcggctaccaattgacaaaaccagacgtcatcctcagactggaaaaaggggaagaaccttggcttgtctga

SEQ ID NO: 979 - DNA, 2690 bp, Synthetic construct
  misc_feature 1..2690: note = 3xFLAG-DNMT3AL-XTEN80-SV40 NLS-ZFP-SV40 NLS-KRAB (DNA sequence)
  source 1..2690: mol_type = other DNA
atgcacgatcaggagtttgacccccctaaggtgtacccacccgtgccagccgagaagaggaagcccatccgcgtgctgtccctgttcgacggcatcgccacaggcctgctggtgctgaaggatctgggcatccaggtggacagatatatcgcctccgaggtgtgcgaggattctatcaccgtgggcatggtgaggcaccagggcaagatcatgtacgtgggcgacgtgcgcagcgtgacacagaagcacatccaggagtggggacccttcgacctggtcatcggaggcagcccctgtaatgacctgtccatcgtgaaccctgcaaggaagggcctgtatgagggaaccggcagactgttctttgagttctacaggctgctgcacgacgcccgccctaaggagggcgatgacaggccattcttttggctgtttgagaacgtggtggccatgggcgtgagcgacaagcgggatatctccagattcctggagtctaatcccgtgatgatcgatgcaaaggaggtgtctgccgcacacagggcaaggtacttttggggaaatctgcctggcatgaaccgcccactggccagcaccgtgaacgacaagctggagctgcaggagtgcctggagcacggaaggatcgccaagttctccaaggtgcggacaatcaccacaagatctaacagcatcaagcagggcaaggatcagcacttccccgtgttcatgaatgagaaggaggacatcctgtggtgtaccgagatggagcgcgtgttcggctttccagtgcactatacagacgtgagcaatatgagccggctggcaaggcagagactgctgggccggtcctggtctgtgccagtgatcagacacctgttcgcccccctgaaggagtactttgcctgcgtgtctagcggcaactctaatgccaacagcagaggcccttccttttcctctggcctggtgccactgtctctgaggggcagccacatgggccccatggagatctacaagaccgtgtccgcctggaagaggcagcctgtgcgcgtgctgtctctgttccgcaacatcgacaaggtgctgaagagcctgggctttctggagagcggatccggatctggaggaggcaccctgaagtatgtggaggatgtgacaaatgtggtgcggagagatgtggagaagtggggccccttcgatctggtgtacggatccacccagccactgggaagctcctgcgataggtgtccaggatggtatatgttccagtttcacagaatcctgcagtacgcactgccaaggcaggagagccagcgccctttcttttggatctttatggacaacctgctgctgacagaggatgaccaggagacaacaacccgcttcctgcagacagaggcagtgaccctgcaggatgtgaggggacgcgactatcagaatgccatgcgggtgtggtctaacatccctggcctgaagagcaagcacgcccccctgacccctaaggaggaggagtacctgcaggcccaggtgcggagcagatccaagctggatgcccctaaggtggacctgctggtgaagaattgtctgctgccactgcgggagtacttcaagtactttagtcagaatagcctgccactgggtggacctagctctggagccccgcctccgtcaggtggatctcctgcaggtagcccaacttccacggaagagggcacgtctgagagtgcgactcctgagagcgggcctggcacaagtactgagcccagcgaaggttctgcacccgggtctccagctgggagccctacctcaacagaggaaggtaccagcacagagccttctgagggtagcgctcctggcacgtccaccgaaccgtccgaggggatggcaccgaagaaaaaacgcaaagttggtcgagccgctatggctgaaagaccattccagtgcagaatatgtatgaggaatttttctaatcccgcgaaccttacgcgccatatcaggacgcacacgggcgaaaagcccttcgcctgcgacatttgtgggagaaagtttgctcaaaacgcgaccaggacaaagcacacgaaaattcacactggtagccagaagccgttccagtgtaggatctgtatgcgcaatttctctcagtccgggcacctcgcgcgacacataagaactcatacgggggagaagccgtttgcatgtgacatctgcggccgcaagtttgcgaataggcatgacagggcaaaacatacgaagatccatacaggttctcaaaaacctttccaatgtcgaatatgcatgcgcaactttagtcggtcagaccacctttctgaacacatcaggacacacactggcgaaaagccgttcgcatgtgacatttgcggcagaaagttcgcacaaagacggtcccgctataagcacaccaaaattcaccttaggcaaaaggatgcagctcgggctccggaccgaaaaaaaagagaaaggtaaacggcgggggaggatcacggaccctggttacatttaaggacgtttttgtagacttcacgagggaggaatggaagctgttggacaccgcccagcaaatcgtgtatcgaaatgtaatgttggaaaattataaaaatctggtttccctcggctaccaattgacaaaaccagacgtcatcctcagactggaaaaaggggaagaaccttggcttgtctga

SEQ ID NO: 980 - DNA, 2690 bp, Synthetic construct
  misc_feature 1..2690: note = 3xFLAG-DNMT3AL-XTEN80-SV40 NLS-ZFP-SV40 NLS-KRAB (DNA sequence)
  source 1..2690: mol_type = other DNA
atgcacgatcaggagtttgacccccctaaggtgtacccacccgtgccagccgagaagaggaagcccatccgcgtgctgtccctgttcgacggcatcgccacaggcctgctggtgctgaaggatctgggcatccaggtggacagatatatcgcctccgaggtgtgcgaggattctatcaccgtgggcatggtgaggcaccagggcaagatcatgtacgtgggcgacgtgcgcagcgtgacacagaagcacatccaggagtggggacccttcgacctggtcatcggaggcagcccctgtaatgacctgtccatcgtgaaccctgcaaggaagggcctgtatgagggaaccggcagactgttctttgagttctacaggctgctgcacgacgcccgccctaaggagggcgatgacaggccattcttttggctgtttgagaacgtggtggccatgggcgtgagcgacaagcgggatatctccagattcctggagtctaatcccgtgatgatcgatgcaaaggaggtgtctgccgcacacagggcaaggtacttttggggaaatctgcctggcatgaaccgcccactggccagcaccgtgaacgacaagctggagctgcaggagtgcctggagcacggaaggatcgccaagttctccaaggtgcggacaatcaccacaagatctaacagcatcaagcagggcaaggatcagcacttccccgtgttcatgaatgagaaggaggacatcctgtggtgtaccgagatggagcgcgtgttcggctttccagtgcactatacagacgtgagcaatatgagccggctggcaaggcagagactgctgggccggtcctggtctgtgccagtgatcagacacctgttcgcccccctgaaggagtactttgcctgcgtgtctagcggcaactctaatgccaacagcagaggcccttccttttcctctggcctggtgccactgtctctgaggggcagccacatgggccccatggagatctacaagaccgtgtccgcctggaagaggcagcctgtgcgcgtgctgtctctgttccgcaacatcgacaaggtgctgaagagcctgggctttctggagagcggatccggatctggaggaggcaccctgaagtatgtggaggatgtgacaaatgtggtgcggagagatgtggagaagtggggccccttcgatctggtgtacggatccacccagccactgggaagctcctgcgataggtgtccaggatggtatatgttccagtttcacagaatcctgcagtacgcactgccaaggcaggagagccagcgccctttcttttggatctttatggacaacctgctgctgacagaggatgaccaggagacaacaacccgcttcctgcagacagaggcagtgaccctgcaggatgtgaggggacgcgactatcagaatgccatgcgggtgtggtctaacatccctggcctgaagagcaagcacgcccccctgacccctaaggaggaggagtacctgcaggcccaggtgcggagcagatccaagctggatgcccctaaggtggacctgctggtgaagaattgtctgctgccactgcgggagtacttcaagtactttagtcagaatagcctgccactgggtggacctagctctggagccccgcctccgtcaggtggatctcctgcaggtagcccaacttccacggaagagggcacgtctgagagtgcgactcctgagagcgggcctggcacaagtactgagcccagcgaaggttctgcacccgggtctccagctgggagccctacctcaacagaggaaggtaccagcacagagccttctgagggtagcgctcctggcacgtccaccgaaccgtccgaggggatggcaccgaagaaaaaacgcaaagttggtcgagcggcaatggcagaacgacccttccaatgccgcatatgtatgcgaaacttcagccagagctcagatctttccagacacatcaggactcacactggcgaaaaaccatttgcatgcgatatatgcgggagaaaattcgcgcaccgcagtacgcgaaacaggcatacaaagatacatactggcagtcaaaagccatttcaatgtcgaatatgcatgaggaactttagtcgatctgacgtgctgagcgctcacatacggacccataccggagagaaaccattcgcttgtgacatctgtggtaggaagttcgcggattcccggacccgcaaaaatcatactaaaattcacactgggtctcagaagccctttcagtgtaggatatgtatgcgcaattttagccagagtggttcattgactcggcatatcagaacacatactggagagaaacctttcgcgtgtgatatttgcggtcgaaagttcgcagatcagagtggacttgcgcaccatactaagatccacctgagacagaaggacgctgcgcgggctccggaccgaaaaaaaagagaaaggtaaacggcgggggaggatcacggaccctggttacatttaaggacgtttttgtagacttcacgagggaggaatggaagctgttggacaccgcccagcaaatcgtgtatcgaaatgtaatgttggaaaattataaaaatctggtttccctcggctaccaattgacaaaaccagacgtcatcctcagactggaaaaaggggaagaaccttggcttgtctga

SEQ ID NO: 981 - DNA, 2690 bp, Synthetic construct
  misc_feature 1..2690: note = 3xFLAG-DNMT3AL-XTEN80-SV40 NLS-ZFP-SV40 NLS-KRAB (DNA sequence)
  source 1..2690: mol_type = other DNA
atgcacgatcaggagtttgacccccctaaggtgtacccacccgtgccagccgagaagaggaagcccatccgcgtgctgtccctgttcgacggcatcgccacaggcctgctggtgctgaaggatctgggcatccaggtggacagatatatcgcctccgaggtgtgcgaggattctatcaccgtgggcatggtgaggcaccagggcaagatcatgtacgtgggcgacgtgcgcagcgtgacacagaagcacatccaggagtggggacccttcgacctggtcatcggaggcagcccctgtaatgacctgtccatcgtgaaccctgcaaggaagggcctgtatgagggaaccggcagactgttctttgagttctacaggctgctgcacgacgcccgccctaaggagggcgatgacaggccattcttttggctgtttgagaacgtggtggccatgggcgtgagcgacaagcgggatatctccagattcctggagtctaatcccgtgatgatcgatgcaaaggaggtgtctgccgcacacagggcaaggtacttttggggaaatctgcctggcatgaaccgcccactggccagcaccgtgaacgacaagctggagctgcaggagtgcctggagcacggaaggatcgccaagttctccaaggtgcggacaatcaccacaagatctaacagcatcaagcagggcaaggatcagcacttccccgtgttcatgaatgagaaggaggacatcctgtggtgtaccgagatggagcgcgtgttcggctttccagtgcactatacagacgtgagcaatatgagccggctggcaaggcagagactgctgggccggtcctggtctgtgccagtgatcagacacctgttcgcccccctgaaggagtactttgcctgcgtgtctagcggcaactctaatgccaacagcagaggcccttccttttcctctggcctggtgccactgtctctgaggggcagccacatgggccccatggagatctacaagaccgtgtccgcctggaagaggcagcctgtgcgcgtgctgtctctgttccgcaacatcgacaaggtgctgaagagcctgggctttctggagagcggatccggatctggaggaggcaccctgaagtatgtggaggatgtgacaaatgtggtgcggagagatgtggagaagtggggccccttcgatctggtgtacggatccacccagccactgggaagctcctgcgataggtgtccaggatggtatatgttccagtttcacagaatcctgcagtacgcactgccaaggcaggagagccagcgccctttcttttggatctttatggacaacctgctgctgacagaggatgaccaggagacaacaacccgcttcctgcagacagaggcagtgaccctgcaggatgtgaggggacgcgactatcagaatgccatgcgggtgtggtctaacatccctggcctgaagagcaagcacgcccccctgacccctaaggaggaggagtacctgcaggcccaggtgcggagcagatccaagctggatgcccctaaggtggacctgctggtgaagaattgtctgctgccactgcgggagtacttcaagtactttagtcagaatagcctgccactgggtggacctagctctggagccccgcctccgtcaggtggatctcctgcaggtagcccaacttccacggaagagggcacgtctgagagtgcgactcctgagagcgggcctggcacaagtactgagcccagcgaaggttctgcacccgggtctccagctgggagccctacctcaacagaggaaggtaccagcacagagccttctgagggtagcgctcctggcacgtccaccgaaccgtccgaggggatggcaccgaagaaaaaacgcaaagttggtcgagctgccatggcggagcgccctttccagtgtaggatatgtatgcgcaacttcagtcagaacccagcccagtggcggcacatacggacgcatactggagaaaagccatttgcatgtgatatctgcgggcgaaaattcgcgcggtcagcagatttgagccggcatacgaagatccatacaggttcacaaaagccatttcaatgtcggatatgtatgcggaacttcagcacgtccggctcattgtcaagacatatacgaactcataccggagagaaacccttcgcgtgcgacatttgcggtcggaagttcgcgcgatccgaccatctgtcacgacatacgaaaatacacactggctctcaaaagccgtttcagtgcagaatttgcatgagaaattttagcaggagcgactcactccttcggcatatacgaacacacactggtgagaagccatttgcctgtgatatttgtggacgaaagtttgcgcaatcttacgataggtttcagcatacaaaaatccaccttcggcaaaaggacgcggcacgggctccggaccgaaaaaaaagagaaaggtaaacggcgggggaggatcacggaccctggttacatttaaggacgtttttgtagacttcacgagggaggaatggaagctgttggacaccgcccagcaaatcgtgtatcgaaatgtaatgttggaaaattataaaaatctggtttccctcggctaccaattgacaaaaccagacgtcatcctcagactggaaaaaggggaagaaccttggcttgtctga

SEQ ID NO: 982 - DNA, 2690 bp, Synthetic construct
  misc_feature 1..2690: note = 3xFLAG-DNMT3AL-XTEN80-SV40 NLS-ZFP-SV40 NLS-KRAB (DNA sequence)
  source 1..2690: mol_type = other DNA
atgcacgatcaggagtttgacccccctaaggtgtacccacccgtgccagccgagaagaggaagcccatccgcgtgctgtccctgttcgacggcatcgccacaggcctgctggtgctgaaggatctgggcatccaggtggacagatatatcgcctccgaggtgtgcgaggattctatcaccgtgggcatggtgaggcaccagggcaagatcatgtacgtgggcgacgtgcgcagcgtgacacagaagcacatccaggagtggggacccttcgacctggtcatcggaggcagcccctgtaatgacctgtccatcgtgaaccctgcaaggaagggcctgtatgagggaaccggcagactgttctttgagttctacaggctgctgcacgacgcccgccctaaggagggcgatgacaggccattcttttggctgtttgagaacgtggtggccatgggcgtgagcgacaagcgggatatctccagattcctggagtctaatcccgtgatgatcgatgcaaaggaggtgtctgccgcacacagggcaaggtacttttggggaaatctgcctggcatgaaccgcccactggccagcaccgtgaacgacaagctggagctgcaggagtgcctggagcacggaaggatcgccaagttctccaaggtgcggacaatcaccacaagatctaacagcatcaagcagggcaaggatcagcacttccccgtgttcatgaatgagaaggaggacatcctgtggtgtaccgagatggagcgcgtgttcggctttccagtgcactatacagacgtgagcaatatgagccggctggcaaggcagagactgctgggccggtcctggtctgtgccagtgatcagacacctgttcgcccccctgaaggagtactttgcctgcgtgtctagcggcaactctaatgccaacagcagaggcccttccttttcctctggcctggtgccactgtctctgaggggcagccacatgggccccatggagatctacaagaccgtgtccgcctggaagaggcagcctgtgcgcgtgctgtctctgttccgcaacatcgacaaggtgctgaagagcctgggctttctggagagcggatccggatctggaggaggcaccctgaagtatgtggaggatgtgacaaatgtggtgcggagagatgtggagaagtggggccccttcgatctggtgtacggatccacccagccactgggaagctcctgcgataggtgtccaggatggtatatgttccagtttcacagaatcctgcagtacgcactgccaaggcaggagagccagcgccctttcttttggatctttatggacaacctgctgctgacagaggatgaccaggagacaacaacccgcttcctgcagacagaggcagtgaccctgcaggatgtgaggggacgcgactatcagaatgccatgcgggtgtggtctaacatccctggcctgaagagcaagcacgcccccctgacccctaaggaggaggagtacctgcaggcccaggtgcggagcagatccaagctggatgcccctaaggtggacctgctggtgaagaattgtctgctgccactgcgggagtacttcaagtactttagtcagaatagcctgccactgggtggacctagctctggagccccgcctccgtcaggtggatctcctgcaggtagcccaacttccacggaagagggcacgtctgagagtgcgactcctgagagcgggcctggcacaagtactgagcccagcgaaggttctgcacccgggtctccagctgggagccctacctcaacagaggaaggtaccagcacagagccttctgagggtagcgctcctggcacgtccaccgaaccgtccgaggggatggcaccgaagaaaaaacgcaaagttggtcgagctgccatggctgaacgaccgtttcaatgtcgaatttgcatgcgcaacttctccacgtccgggtctctcagtagacacatcagaacgcatactggtgaaaaaccattcgcttgtgacatatgcggccgaaaattcgcgcggagcgaccacctgtcacggcataccaaaattcacaccgggagtcaaaaaccgttccagtgtaggatatgtatgcgcaacttcagccggtctgacagtctgcttcgacatattcggacgcacactggtgaaaagccgtttgcgtgcgacatttgtggtcgaaagttcgctcaatcttatgataggtttcaacacaccaaaatacatacgggctcccagaagccgttccagtgcagaatatgcatgagaaatttctctcgcagtgacaatttgtccacccatattcgaacgcacaccggcgagaaacccttcgcctgcgatatttgcggtcgcaagttcgcagacaacagggataggataaaacatacgaagatccatctgaggcaaaaagacgccgcccgggctccggaccgaaaaaaaagagaaaggtaaacggcgggggaggatcacggaccctggttacatttaaggacgtttttgtagacttcacgagggaggaatggaagctgttggacaccgcccagcaaatcgtgtatcgaaatgtaatgttggaaaattataaaaatctggtttccctcggctaccaattgacaaaaccagacgtcatcctcagactggaaaaaggggaagaaccttggcttgtctga

SEQ ID NO: 983 - DNA, 2690 bp, Synthetic construct
  misc_feature 1..2690: note = 3xFLAG-DNMT3AL-XTEN80-SV40 NLS-ZFP-SV40 NLS-KRAB (DNA sequence)
  source 1..2690: mol_type = other DNA
atgcacgatcaggagtttgacccccctaaggtgtacccacccgtgccagccgagaagaggaagcccatccgcgtgctgtccctgttcgacggcatcgccacaggcctgctggtgctgaaggatctgggcatccaggtggacagatatatcgcctccgaggtgtgcgaggattctatcaccgtgggcatggtgaggcaccagggcaagatcatgtacgtgggcgacgtgcgcagcgtgacacagaagcacatccaggagtggggacccttcgacctggtcatcggaggcagcccctgtaatgacctgtccatcgtgaaccctgcaaggaagggcctgtatgagggaaccggcagactgttctttgagttctacaggctgctgcacgacgcccgccctaaggagggcgatgacaggccattcttttggctgtttgagaacgtggtggccatgggcgtgagcgacaagcgggatatctccagattcctggagtctaatcccgtgatgatcgatgcaaaggaggtgtctgccgcacacagggcaaggtacttttggggaaatctgcctggcatgaaccgcccactggccagcaccgtgaacgacaagctggagctgcaggagtgcctggagcacggaaggatcgccaagttctccaaggtgcggacaatcaccacaagatctaacagcatcaagcagggcaaggatcagcacttccccgtgttcatgaatgagaaggaggacatcctgtggtgtaccgagatggagcgcgtgttcggctttccagtgcactatacagacgtgagcaatatgagccggctggcaaggcagagactgctgggccggtcctggtctgtgccagtgatcagacacctgttcgcccccctgaaggagtactttgcctgcgtgtctagcggcaactctaatgccaacagcagaggcccttccttttcctctggcctggtgccactgtctctgaggggcagccacatgggccccatggagatctacaagaccgtgtccgcctggaagaggcagcctgtgcgcgtgctgtctctgttccgcaacatcgacaaggtgctgaagagcctgggctttctggagagcggatccggatctggaggaggcaccctgaagtatgtggaggatgtgacaaatgtggtgcggagagatgtggagaagtggggccccttcgatctggtgtacggatccacccagccactgggaagctcctgcgataggtgtccaggatggtatatgttccagtttcacagaatcctgcagtacgcactgccaaggcaggagagccagcgccctttcttttggatctttatggacaacctgctgctgacagaggatgaccaggagacaacaacccgcttcctgcagacagaggcagtgaccctgcaggatgtgaggggacgcgactatcagaatgccatgcgggtgtggtctaacatccctggcctgaagagcaagcacgcccccctgacccctaaggaggaggagtacctgcaggcccaggtgcggagcagatccaagctggatgcccctaaggtggacctgctggtgaagaattgtctgctgccactgcgggagtacttcaagtactttagtcagaatagcctgccactgggtggacctagctctggagccccgcctccgtcaggtggatctcctgcaggtagcccaacttccacggaagagggcacgtctgagagtgcgactcctgagagcgggcctggcacaagtactgagcccagcgaaggttctgcacccgggtctccagctgggagccctacctcaacagaggaaggtaccagcacagagccttctgagggtagcgctcctggcacgtccaccgaaccgtccgaggggatggcaccgaagaaaaaacgcaaagttggtcgagcagccatggcagagcggccattccagtgcagaatctgcatgcggaacttttccgataggtccaatctgtcacgccatattaggacacacacgggtgaaaaaccgttcgcgtgtgacatatgcggtcgcaaattcgccctgagacagaacctgattatgcacacaaaaatacatacgggaagccagaaaccgttccagtgtcggatatgcatgaggaacttcagtgagagggggactttggcgaggcacatcaggactcacactggggagaagccctttgcatgtgatatctgtggccgaaaatttgctcgatcagatgctctcacccaacatacaaagatccatactggctctcaaaaaccgtttcaatgtagaatttgtatgcgcaacttctctcggtcagatagcctgtcccagcatatccgaactcatacaggtgagaaacccttcgcatgcgacatctgtgggcgaaaatttgctagaaaagcagaccggacccgacacacaaagattcatctgcgacaaaaagacgccgcccgggctccggaccgaaaaaaaagagaaaggtaaacggcgggggaggatcacggaccctggttacatttaaggacgtttttgtagacttcacgagggaggaatggaagctgttggacaccgcccagcaaatcgtgtatcgaaatgtaatgttggaaaattataaaaatctggtttccctcggctaccaattgacaaaaccagacgtcatcctcagactggaaaaaggggaagaaccttggcttgtctga

SEQ ID NO: 984 - DNA, 2690 bp, Synthetic construct
  misc_feature 1..2690: note = 3xFLAG-DNMT3AL-XTEN80-SV40 NLS-ZFP-SV40 NLS-KRAB (DNA sequence)
  source 1..2690: mol_type = other DNA
atgcacgatcaggagtttgacccccctaaggtgtacccacccgtgccagccgagaagaggaagcccatccgcgtgctgtccctgttcgacggcatcgccacaggcctgctggtgctgaaggatctgggcatccaggtggacagatatatcgcctccgaggtgtgcgaggattctatcaccgtgggcatggtgaggcaccagggcaagatcatgtacgtgggcgacgtgcgcagcgtgacacagaagcacatccaggagtggggacccttcgacctggtcatcggaggcagcccctgtaatgacctgtccatcgtgaaccctgcaaggaagggcctgtatgagggaaccggcagactgttctttgagttctacaggctgctgcacgacgcccgccctaaggagggcgatgacaggccattcttttggctgtttgagaacgtggtggccatgggcgtgagcgacaagcgggatatctccagattcctggagtctaatcccgtgatgatcgatgcaaaggaggtgtctgccgcacacagggcaaggtacttttggggaaatctgcctggcatgaaccgcccactggccagcaccgtgaacgacaagctggagctgcaggagtgcctggagcacggaaggatcgccaagttctccaaggtgcggacaatcaccacaagatctaacagcatcaagcagggcaaggatcagcacttccccgtgttcatgaatgagaaggaggacatcctgtggtgtaccgagatggagcgcgtgttcggctttccagtgcactatacagacgtgagcaatatgagccggctggcaaggcagagactgctgggccggtcctggtctgtgccagtgatcagacacctgttcgcccccctgaaggagtactttgcctgcgtgtctagcggcaactctaatgccaacagcagaggcccttccttttcctctggcctggtgccactgtctctgaggggcagccacatgggccccatggagatctacaagaccgtgtccgcctggaagaggcagcctgtgcgcgtgctgtctctgttccgcaacatcgacaaggtgctgaagagcctgggctttctggagagcggatccggatctggaggaggcaccctgaagtatgtggaggatgtgacaaatgtggtgcggagagatgtggagaagtggggccccttcgatctggtgtacggatccacccagccactgggaagctcctgcgataggtgtccaggatggtatatgttccagtttcacagaatcctgcagtacgcactgccaaggcaggagagccagcgccctttcttttggatctttatggacaacctgctgctgacagaggatgaccaggagacaacaacccgcttcctgcagacagaggcagtgaccctgcaggatgtgaggggacgcgactatcagaatgccatgcgggtgtggtctaacatccctggcctgaagagcaagcacgcccccctgacccctaaggaggaggagtacctgcaggcccaggtgcggagcagatccaagctggatgcccctaaggtggacctgctggtgaagaattgtctgctgccactgcgggagtacttcaagtactttagtcagaatagcctgccactgggtggacctagctctggagccccgcctccgtcaggtggatctcctgcaggtagcccaacttccacggaagagggcacgtctgagagtgcgactcctgagagcgggcctggcacaagtactgagcccagcgaaggttctgcacccgggtctccagctgggagccctacctcaacagaggaaggtaccagcacagagccttctgagggtagcgctcctggcacgtccaccgaaccgtccgaggggatggcaccgaagaaaaaacgcaaagttggtcgagcggccatggctgagaggccttttcaatgtagaatatgtatgcgaaatttttcacagtactgttgtctcacgaaccacataaggactcatacaggggagaaaccatttgcctgtgacatttgcggtcgcaaatttgctacttctggaaacctgactcggcacactaagattcacacagggtcccagaagcccttccagtgtcgcatttgcatgaggaattttagtcaaagctctgacttgtcaaggcatattcgcacgcacacgggcgaaaagccgttcgcttgcgacatatgcgggcggaaatttgccttccgctattatttgaagagacacaccaagatacatacgggctctcagaagccctttcagtgtaggatttgcatgcgcaatttttcacaatctggtgatctcacgcgacacatccggactcacacaggtgaaaagcctttcgcgtgcgacatttgcggccggaagtttgctgacaagggcaacctcacaaagcatacgaagattcacttgaggcagaaagatgctgctcgggctccggaccgaaaaaaaagagaaaggtaaacggcgggggaggatcacggaccctggttacatttaaggacgtttttgtagacttcacgagggaggaatggaagctgttggacaccgcccagcaaatcgtgtatcgaaatgtaatgttggaaaattataaaaatctggtttccctcggctaccaattgacaaaaccagacgtcatcctcagactggaaaaaggggaagaaccttggcttgtctga

SEQ ID NO: 985 - DNA, 2690 bp, Synthetic construct
  misc_feature 1..2690: note = 3xFLAG-DNMT3AL-XTEN80-SV40 NLS-ZFP-SV40 NLS-KRAB (DNA sequence)
  source 1..2690: mol_type = other DNA
atgcacgatcaggagtttgacccccctaaggtgtacccacccgtgccagccgagaagaggaagcccatccgcgtgctgtccctgttcgacggcatcgccacaggcctgctggtgctgaaggatctgggcatccaggtggacagatatatcgcctccgaggtgtgcgaggattctatcaccgtgggcatggtgaggcaccagggcaagatcatgtacgtgggcgacgtgcgcagcgtgacacagaagcacatccaggagtggggacccttcgacctggtcatcggaggcagcccctgtaatgacctgtccatcgtgaaccctgcaaggaagggcctgtatgagggaaccggcagactgttctttgagttctacaggctgctgcacgacgcccgccctaaggagggcgatgacaggccattcttttggctgtttgagaacgtggtggccatgggcgtgagcgacaagcgggatatctccagattcctggagtctaatcccgtgatgatcgatgcaaaggaggtgtctgccgcacacagggcaaggtacttttggggaaatctgcctggcatgaaccgcccactggccagcaccgtgaacgacaagctggagctgcaggagtgcctggagcacggaaggatcgccaagttctccaaggtgcggacaatcaccacaagatctaacagcatcaagcagggcaaggatcagcacttccccgtgttcatgaatgagaaggaggacatcctgtggtgtaccgagatggagcgcgtgttcggctttccagtgcactatacagacgtgagcaatatgagccggctggcaaggcagagactgctgggccggtcctggtctgtgccagtgatcagacacctgttcgcccccctgaaggagtactttgcctgcgtgtctagcggcaactctaatgccaacagcagaggcccttccttttcctctggcctggtgccactgtctctgaggggcagccacatgggccccatggagatctacaagaccgtgtccgcctggaagaggcagcctgtgcgcgtgctgtctctgttccgcaacatcgacaaggtgctgaagagcctgggctttctggagagcggatccggatctggaggaggcaccctgaagtatgtggaggatgtgacaaatgtggtgcggagagatgtggagaagtggggccccttcgatctggtgtacggatccacccagccactgggaagctcctgcgataggtgtccaggatggtatatgttccagtttcacagaatcctgcagtacgcactgccaaggcaggagagccagcgccctttcttttggatctttatggacaacctgctgctgacagaggatgaccaggagacaacaacccgcttcctgcagacagaggcagtgaccctgcaggatgtgaggggacgcgactatcagaatgccatgcgggtgtggtctaacatccctggcctgaagagcaagcacgcccccctgacccctaaggaggaggagtacctgcaggcccaggtgcggagcagatccaagctggatgcccctaaggtggacctgctggtgaagaattgtctgctgccactgcgggagtacttcaagtactttagtcagaatagcctgccactgggtggacctagctctggagccccgcctccgtcaggtggatctcctgcaggtagcccaacttccacggaagagggcacgtctgagagtgcgactcctgagagcgggcctggcacaagtactgagcccagcgaaggttctgcacccgggtctccagctgggagccctacctcaacagaggaaggtaccagcacagagccttctgagggtagcgctcctggcacgtccaccgaaccgtccgaggggatggcaccgaagaaaaaacgcaaagttggtcgagccgccatggccgaacgaccattccagtgcaggatatgtatgcgcaatttttcaaccagtggttcattgtcacgacatattagaacacacaccggtgagaaaccctttgcgtgtgacatctgtgggaggaaattcgcaagatctgacaaccttacgacacatacaaagattcacacaggctctcaaaagcccttccagtgccgaatttgcatgcgaaacttttcccagtctggtaatctcgctcgacatatcagaacccacacgggggaaaaaccattcgcttgtgatatttgcggacgaaagttcgccgacagaaccacactcatgagacacactaaaatccatactggtagtcagaagccgtttcagtgtagaatctgcatgaggaacttttcccagtcaggccaccttgcaagacatatacgaactcacactggagaaaagccgttcgcctgtgacatttgtgggcgcaagttcgcgcaactcacccatctgaatagccatacgaagattcacttgagacagaaagatgcggctcgggctccggaccgaaaaaaaagagaaaggtaaacggcgggggaggatcacggaccctggttacatttaaggacgtttttgtagacttcacgagggaggaatggaagctgttggacaccgcccagcaaatcgtgtatcgaaatgtaatgttggaaaattataaaaatctggtttccctcggctaccaattgacaaaaccagacgtcatcctcagactggaaaaaggggaagaaccttggcttgtctga

SEQ ID NO: 986 - DNA, 2690 bp, Synthetic construct
  misc_feature 1..2690: note = 3xFLAG-DNMT3AL-XTEN80-SV40 NLS-ZFP-SV40 NLS-KRAB (DNA sequence)
  source 1..2690: mol_type = other DNA
atgcacgatcaggagtttgacccccctaaggtgtacccacccgtgccagccgagaagaggaagcccatccgcgtgctgtccctgttcgacggcatcgccacaggcctgctggtgctgaaggatctgggcatccaggtggacagatatatcgcctccgaggtgtgcgaggattctatcaccgtgggcatggtgaggcaccagggcaagatcatgtacgtgggcgacgtgcgcagcgtgacacagaagcacatccaggagtggggacccttcgacctggtcatcggaggcagcccctgtaatgacctgtccatcgtgaaccctgcaaggaagggcctgtatgagggaaccggcagactgttctttgagttctacaggctgctgcacgacgcccgccctaaggagggcgatgacaggccattcttttggctgtttgagaacgtggtggccatgggcgtgagcgacaagcgggatatctccagattcctggagtctaatcccgtgatgatcgatgcaaaggaggtgtctgccgcacacagggcaaggtacttttggggaaatctgcctggcatgaaccgcccactggccagcaccgtgaacgacaagctggagctgcaggagtgcctggagcacggaaggatcgccaagttctccaaggtgcggacaatcaccacaagatctaacagcatcaagcagggcaaggatcagcacttccccgtgttcatgaatgagaaggaggacatcctgtggtgtaccgagatggagcgcgtgttcggctttccagtgcactatacagacgtgagcaatatgagccggctggcaaggcagagactgctgggccggtcctggtctgtgccagtgatcagacacctgttcgcccccctgaaggagtactttgcctgcgtgtctagcggcaactctaatgccaacagcagaggcccttccttttcctctggcctggtgccactgtctctgaggggcagccacatgggccccatggagatctacaagaccgtgtccgcctggaagaggcagcctgtgcgcgtgctgtctctgttccgcaacatcgacaaggtgctgaagagcctgggctttctggagagcggatccggatctggaggaggcaccctgaagtatgtggaggatgtgacaaatgtggtgcggagagatgtggagaagtggggccccttcgatctggtgtacggatccacccagccactgggaagctcctgcgataggtgtccaggatggtatatgttccagtttcacagaatcctgcagtacgcactgccaaggcaggagagccagcgccctttcttttggatctttatggacaacctgctgctgacagaggatgaccaggagacaacaacccgcttcctgcagacagaggcagtgaccctgcaggatgtgaggggacgcgactatcagaatgccatgcgggtgtggtctaacatccctggcctgaagagcaagcacgcccccctgacccctaaggaggaggagtacctgcaggcccaggtgcggagcagatccaagctggatgcccctaaggtggacctgctggtgaagaattgtctgctgccactgcgggagtacttcaagtactttagtcagaatagcctgccactgggtggacctagctctggagccccgcctccgtcaggtggatctcctgcaggtagcccaacttccacggaagagggcacgtctgagagtgcgactcctgagagcgggcctggcacaagtactgagcccagcgaaggttctgcacccgggtctccagctgggagccctacctcaacagaggaaggtaccagcacagagccttctgagggtagcgctcctggcacgtccaccgaaccgtccgaggggatggcaccgaagaaaaaacgcaaagttggtcgagcagctatggctgaacgcccattccagtgtcggatctgcatgcgcaacttttctataaaacacgatcttcaccgacacattcggacacatactggggagaagccctttgcgtgtgacatctgtggccgaaagttcgctagatccgcaaacttgactcggcatacgaaaattcacactggaagccagaaacctttccaatgtcgaatctgtatgaggaactttagcagaagtgataatctcgccaggcatatccgaacgcacacaggcgagaagccattcgcatgtgatatttgtggtagaaagttcgcccaaaatgtctctcgcccacgccatactaagatccacacgggctcccagaagccgttccaatgccgcatttgcatgcgaaacttttccagatcagacgatctgagcaagcatattaggacgcatacaggggagaagccttttgcttgcgacatttgcggccggaaatttgctgactcaagtcacagaacacggcataccaagatacaccttcgacaaaaagatgccgcacgggctccggaccgaaaaaaaagagaaaggtaaacggcgggggaggatcacggaccctggttacatttaaggacgtttttgtagacttcacgagggaggaatggaagctgttggacaccgcccagcaaatcgtgtatcgaaatgtaatgttggaaaattataaaaatctggtttccctcggctaccaattgacaaaaccagacgtcatcctcagactggaaaaaggggaagaaccttggcttgtctga

SEQ ID NO: 987 - DNA, 2690 bp, Synthetic construct
  misc_feature 1..2690: note = 3xFLAG-DNMT3AL-XTEN80-SV40 NLS-ZFP-SV40 NLS-KRAB (DNA sequence)
  source 1..2690: mol_type = other DNA
atgcacgatcaggagtttgacccccctaaggtgtacccacccgtgccagccgagaagaggaagcccatccgcgtgctgtccctgttcgacggcatcgccacaggcctgctggtgctgaaggatctgggcatccaggtggacagatatatcgcctccgaggtgtgcgaggattctatcaccgtgggcatggtgaggcaccagggcaagatcatgtacgtgggcgacgtgcgcagcgtgacacagaagcacatccaggagtggggacccttcgacctggtcatcggaggcagcccctgtaatgacctgtccatcgtgaaccctgcaaggaagggcctgtatgagggaaccggcagactgttctttgagttctacaggctgctgcacgacgcccgccctaaggagggcgatgacaggccattcttttggctgtttgagaacgtggtggccatgggcgtgagcgacaagcgggatatctccagattcctggagtctaatcccgtgatgatcgatgcaaaggaggtgtctgccgcacacagggcaaggtacttttggggaaatctgcctggcatgaaccgcccactggccagcaccgtgaacgacaagctggagctgcaggagtgcctggagcacggaaggatcgccaagttctccaaggtgcggacaatcaccacaagatctaacagcatcaagcagggcaaggatcagcacttccccgtgttcatgaatgagaaggaggacatcctgtggtgtaccgagatggagcgcgtgttcggctttccagtgcactatacagacgtgagcaatatgagccggctggcaaggcagagactgctgggccggtcctggtctgtgccagtgatcagacacctgttcgcccccctgaaggagtactttgcctgcgtgtctagcggcaactctaatgccaacagcagaggcccttccttttcctctggcctggtgccactgtctctgaggggcagccacatgggccccatggagatctacaagaccgtgtccgcctggaagaggcagcctgtgcgcgtgctgtctctgttccgcaacatcgacaaggtgctgaagagcctgggctttctggagagcggatccggatctggaggaggcaccctgaagtatgtggaggatgtgacaaatgtggtgcggagagatgtggagaagtggggccccttcgatctggtgtacggatccacccagccactgggaagctcctgcgataggtgtccaggatggtatatgttccagtttcacagaatcctgcagtacgcactgccaaggcaggagagccagcgccctttcttttggatctttatggacaacctgctgctgacagaggatgaccaggagacaacaacccgcttcctgcagacagaggcagtgaccctgcaggatgtgaggggacgcgactatcagaatgccatgcgggtgtggtctaacatccctggcctgaagagcaagcacgcccccctgacccctaaggaggaggagtacctgcaggcccaggtgcggagcagatccaagctggatgcccctaaggtggacctgctggtgaagaattgtctgctgccactgcgggagtacttcaagtactttagtcagaatagcctgccactgggtggacctagctctggagccccgcctccgtcaggtggatctcctgcaggtagcccaacttccacggaagagggcacgtctgagagtgcgactcctgagagcgggcctggcacaagtactgagcccagcgaaggttctgcacccgggtctccagctgggagccctacctcaacagaggaaggtaccagcacagagccttctgagggtagcgctcctggcacgtccaccgaaccgtccgaggggatggcaccgaagaaaaaacgcaaagttggtcgagcggccatggcggaacgaccctttcagtgccgaatttgcatgaggaacttttcacgatctgataacctggcgaggcacatccgaacacatacgggcgagaagccattcgcatgtgatatctgcgggcgaaagttcgcccaaaatgtcagtagaccgcgacatactaaaatacacactggctcacagaagccgttccaatgccgcatctgtatgcgcaatttttcccgaagcgacgatctgtctaaacatattcggacgcacactggggaaaagcctttcgcttgtgacatctgtgggaggaagttcgctgacagctctcataggacacgccatactaagattcataccggaagccagaagcctttccagtgtcggatttgcatgagaaactttagcacttctagcaacagaaagacacatatacgaacccatacgggtgagaaaccgttcgcatgcgatatctgtgggcgaaaatttgcagcccaatggaccagagcttgccataccaagatacaccttcggcagaaggacgctgcacgggctccggaccgaaaaaaaagagaaaggtaaacggcgggggaggatcacggaccctggttacatttaaggacgtttttgtagacttcacgagggaggaatggaagctgttggacaccgcccagcaaatcgtgtatcgaaatgtaatgttggaaaattataaaaatctggtttccctcggctaccaattgacaaaaccagacgtcatcctcagactggaaaaaggggaagaaccttggcttgtctga

SEQ ID NO: 988 - DNA, 2690 bp, Synthetic construct
  misc_feature 1..2690: note = 3xFLAG-DNMT3AL-XTEN80-SV40 NLS-ZFP-SV40 NLS-KRAB (DNA sequence)
  source 1..2690: mol_type = other DNA
atgcacgatcaggagtttgacccccctaaggtgtacccacccgtgccagccgagaagaggaagcccatccgcgtgctgtccctgttcgacggcatcgccacaggcctgctggtgctgaaggatctgggcatccaggtggacagatatatcgcctccgaggtgtgcgaggattctatcaccgtgggcatggtgaggcaccagggcaagatcatgtacgtgggcgacgtgcgcagcgtgacacagaagcacatccaggagtggggacccttcgacctggtcatcggaggcagcccctgtaatgacctgtccatcgtgaaccctgcaaggaagggcctgtatgagggaaccggcagactgttctttgagttctacaggctgctgcacgacgcccgccctaaggagggcgatgacaggccattcttttggctgtttgagaacgtggtggccatgggcgtgagcgacaagcgggatatctccagattcctggagtctaatcccgtgatgatcgatgcaaaggaggtgtctgccgcacacagggcaaggtacttttggggaaatctgcctggcatgaaccgcccactggccagcaccgtgaacgacaagctggagctgcaggagtgcctggagcacggaaggatcgccaagttctccaaggtgcggacaatcaccacaagatctaacagcatcaagcagggcaaggatcagcacttccccgtgttcatgaatgagaaggaggacatcctgtggtgtaccgagatggagcgcgtgttcggctttccagtgcactatacagacgtgagcaatatgagccggctggcaaggcagagactgctgggccggtcctggtctgtgccagtgatcagacacctgttcgcccccctgaaggagtactttgcctgcgtgtctagcggcaactctaatgccaacagcagaggcccttccttttcctctggcctggtgccactgtctctgaggggcagccacatgggccccatggagatctacaagaccgtgtccgcctggaagaggcagcctgtgcgcgtgctgtctctgttccgcaacatcgacaaggtgctgaagagcctgggctttctggagagcggatccggatctggaggaggcaccctgaagtatgtggaggatgtgacaaatgtggtgcggagagatgtggagaagtggggccccttcgatctggtgtacggatccacccagccactgggaagctcctgcgataggtgtccaggatggtatatgttccagtttcacagaatcctgcagtacgcactgccaaggcaggagagccagcgccctttcttttggatctttatggacaacctgctgctgacagaggatgaccaggagacaacaacccgcttcctgcagacagaggcagtgaccctgcaggatgtgaggggacgcgactatcagaatgccatgcgggtgtggtctaacatccctggcctgaagagcaagcacgcccccctgacccctaaggaggaggagtacctgcaggcccaggtgcggagcagatccaagctggatgcccctaaggtggacctgctggtgaagaattgtctgctgccactgcgggagtacttcaagtactttagtcagaatagcctgccactgggtggacctagctctggagccccgcctccgtcaggtggatctcctgcaggtagcccaacttccacggaagagggcacgtctgagagtgcgactcctgagagcgggcctggcacaagtactgagcccagcgaaggttctgcacccgggtctccagctgggagccctacctcaacagaggaaggtaccagcacagagccttctgagggtagcgctcctggcacgtccaccgaaccgtccgaggggatggcaccgaagaaaaaacgcaaagttggtcgagctgcgatggcagaacgaccttttcaatgccgaatttgtatgaggaacttttcccggtcagacgacctttccaagcacatcagaactcataccggagaaaaaccgttcgcctgtgacatttgtggacggaagtttgctgactcctctcacaggactcgccacactaagatacacaccggaagtcagaagcccttccaatgtaggatatgcatgagaaacttcagtacgtcatcaaaccgaaaaacgcatatcaggacacataccggcgaaaagccgtttgcatgtgatatctgcggcaggaaatttgcagctcagtggacacgggcatgtcacacaaaaatccataccggtagtcaaaaaccgtttcagtgtcgaatctgcatgaggaactttagccggaagcagacgagaaccacgcatataagaactcacacaggtgagaaaccctttgcgtgcgatatctgcggtcgcaaatttgctcaccgatcctccctgaggcgacatactaaaatacatctgcgacagaaagacgcggctcgggctccggaccgaaaaaaaagagaaaggtaaacggcgggggaggatcacggaccctggttacatttaaggacgtttttgtagacttcacgagggaggaatggaagctgttggacaccgcccagcaaatcgtgtatcgaaatgtaatgttggaaaattataaaaatctggtttccctcggctaccaattgacaaaaccagacgtcatcctcagactggaaaaaggggaagaaccttggcttgtctga

SEQ ID NO: 989 - DNA, 2690 bp, Synthetic construct
  misc_feature 1..2690: note = 3xFLAG-DNMT3AL-XTEN80-SV40 NLS-ZFP-SV40 NLS-KRAB (DNA sequence)
  source 1..2690: mol_type = other DNA
atgcacgatcaggagtttgacccccctaaggtgtacccacccgtgccagccgagaagaggaagcccatccgcgtgctgtccctgttcgacggcatcgccacaggcctgctggtgctgaaggatctgggcatccaggtggacagatatatcgcctccgaggtgtgcgaggattctatcaccgtgggcatggtgaggcaccagggcaagatcatgtacgtgggcgacgtgcgcagcgtgacacagaagcacatccaggagtggggacccttcgacctggtcatcggaggcagcccctgtaatgacctgtccatcgtgaaccctgcaaggaagggcctgtatgagggaaccggcagactgttctttgagttctacaggctgctgcacgacgcccgccctaaggagggcgatgacaggccattcttttggctgtttgagaacgtggtggccatgggcgtgagcgacaagcgggatatctccagattcctggagtctaatcccgtgatgatcgatgcaaaggaggtgtctgccgcacacagggcaaggtacttttggggaaatctgcctggcatgaaccgcccactggccagcaccgtgaacgacaagctggagctgcaggagtgcctggagcacggaaggatcgccaagttctccaaggtgcggacaatcaccacaagatctaacagcatcaagcagggcaaggatcagcacttccccgtgttcatgaatgagaaggaggacatcctgtggtgtaccgagatggagcgcgtgttcggctttccagtgcactatacagacgtgagcaatatgagccggctggcaaggcagagactgctgggccggtcctggtctgtgccagtgatcagacacctgttcgcccccctgaaggagtactttgcctgcgtgtctagcggcaactctaatgccaacagcagaggcccttccttttcctctggcctggtgccactgtctctgaggggcagccacatgggccccatggagatctacaagaccgtgtccgcctggaagaggcagcctgtgcgcgtgctgtctctgttccgcaacatcgacaaggtgctgaagagcctgggctttctggagagcggatccggatctggaggaggcaccctgaagtatgtggaggatgtgacaaatgtggtgcggagagatgtggagaagtggggccccttcgatctggtgtacggatccacccagccactgggaagctcctgcgataggtgtccaggatggtatatgttccagtttcacagaatcctgcagtacgcactgccaaggcaggagagccagcgccctttcttttggatctttatggacaacctgctgctgacagaggatgaccaggagacaacaacccgcttcctgcagacagaggcagtgaccctgcaggatgtgaggggacgcgactatcagaatgccatgcgggtgtggtctaacatccctggcctgaagagcaagcacgcccccctgacccctaaggaggaggagtacctgcaggcccaggtgcggagcagatccaagctggatgcccctaaggtggacctgctggtgaagaattgtctgctgccactgcgggagtacttcaagtactttagtcagaatagcctgccactgggtggacctagctctggagccccgcctccgtcaggtggatctcctgcaggtagcccaacttccacggaagagggcacgtctgagagtgcgactcctgagagcgggcctggcacaagtactgagcccagcgaaggttctgcacccgggtctccagctgggagccctacctcaacagaggaaggtaccagcacagagccttctgagggtagcgctcctggcacgtccaccgaaccgtccgaggggatggcaccgaagaaaaaacgcaaagttggtcgagccgccatggcagaacggccttttcagtgtcggatctgcatgagaaactttagtcagagtgcccatcgcaagaatcatattcgaactcataccggtgaaaaaccgttcgcgtgcgacatctgtggtcgaaagtttgccacatcatccaatagaaaaacgcatactaagattcataccggtagccagaaaccattccaatgtagaatctgcatgcgaaatttcagcaggagtgacaatttgtccgcacatatacggacacacacgggcgaaaaaccctttgcttgcgatatatgcggtagaaagttcgctaggaacaacgaccgaaaaacacacacgaagattcatacaggtagtcagaagccatttcaatgtcggatctgtatgcgaaatttctctacttctggcagcctgtcccggcacatcagaacacataccggtgagaagccatttgcatgtgacatatgtgggagaaaatttgcccaggcgggtcaccttgcgaagcatacaaagatccacctccgccagaaggacgccgcacgggctccggaccgaaaaaaaagagaaaggtaaacggcgggggaggatcacggaccctggttacatttaaggacgtttttgtagacttcacgagggaggaatggaagctgttggacaccgcccagcaaatcgtgtatcgaaatgtaatgttggaaaattataaaaatctggtttccctcggctaccaattgacaaaaccagacgtcatcctcagactggaaaaaggggaagaaccttggcttgtctga

SEQ ID NO: 990 - DNA, 2690 bp, Synthetic construct
  misc_feature 1..2690: note = 3xFLAG-DNMT3AL-XTEN80-SV40 NLS-ZFP-SV40 NLS-KRAB (DNA sequence)
  source 1..2690: mol_type = other DNA
atgcacgatcaggagtttgacccccctaaggtgtacccacccgtgccagccgagaagaggaagcccatccgcgtgctgtccctgttcgacggcatcgccacaggcctgctggtgctgaaggatctgggcatccaggtggacagatatatcgcctccgaggtgtgcgaggattctatcaccgtgggcatggtgaggcaccagggcaagatcatgtacgtgggcgacgtgcgcagcgtgacacagaagcacatccaggagtggggacccttcgacctggtcatcggaggcagcccctgtaatgacctgtccatcgtgaaccctgcaaggaagggcctgtatgagggaaccggcagactgttctttgagttctacaggctgctgcacgacgcccgccctaaggagggcgatgacaggccattcttttggctgtttgagaacgtggtggccatgggcgtgagcgacaagcgggatatctccagattcctggagtctaatcccgtgatgatcgatgcaaaggaggtgtctgccgcacacagggcaaggtacttttggggaaatctgcctggcatgaaccgcccactggccagcaccgtgaacgacaagctggagctgcaggagtgcctggagcacggaaggatcgccaagttctccaaggtgcggacaatcaccacaagatctaacagcatcaagcagggcaaggatcagcacttccccgtgttcatgaatgagaaggaggacatcctgtggtgtaccgagatggagcgcgtgttcggctttccagtgcactatacagacgtgagcaatatgagccggctggcaaggcagagactgctgggccggtcctggtctgtgccagtgatcagacacctgttcgcccccctgaaggagtactttgcctgcgtgtctagcggcaactctaatgccaacagcagaggcccttccttttcctctggcctggtgccactgtctctgaggggcagccacatgggccccatggagatctacaagaccgtgtccgcctggaagaggcagcctgtgcgcgtgctgtctctgttccgcaacatcgacaaggtgctgaagagcctgggctttctggagagcggatccggatctggaggaggcaccctgaagtatgtggaggatgtgacaaatgtggtgcggagagatgtggagaagtggggccccttcgatctggtgtacggatccacccagccactgggaagctcctgcgataggtgtccaggatggtatatgttccagtttcacagaatcctgcagtacgcactgccaaggcaggagagccagcgccctttcttttggatctttatggacaacctgctgctgacagaggatgaccaggagacaacaacccgcttcctgcagacagaggcagtgaccctgcaggatgtgaggggacgcgactatcagaatgccatgcgggtgtggtctaacatccctggcctgaagagcaagcacgcccccctgacccctaaggaggaggagtacctgcaggcccaggtgcggagcagatccaagctggatgcccctaaggtggacctgctggtgaagaattgtctgctgccactgcgggagtacttcaagtactttagtcagaatagcctgccactgggtggacctagctctggagccccgcctccgtcaggtggatctcctgcaggtagcccaacttccacggaagagggcacgtctgagagtgcgactcctgagagcgggcctggcacaagtactgagcccagcgaaggttctgcacccgggtctccagctgggagccctacctcaacagaggaaggtaccagcacagagccttctgagggtagcgctcctggcacgtccaccgaaccgtccgaggggatggcaccgaagaaaaaacgcaaagttggtcgagcggctatggcagagcggccattccaatgtaggatatgtatgaggaacttctcccggagcgatcacctgtcccaacacatccgcacgcatacgggtgagaagccgtttgcttgtgatatctgcggaagaaaatttgcagcatccagtacacgcacaaagcatacgaagattcatacgggatcccaaaagccctttcaatgcaggatttgtatgaggaacttcagtcggtccgacgatctgacacgacatattagaactcatactggagagaagccattcgcatgtgacatctgcggtaggaagttcgcgcagaaatctaacctgtcatctcacaccaagatacatacaggctcacagaagccgtttcaatgccgcatctgcatgaggaatttcagccagtccgcaaacagaactacgcatattcggacgcataccggcgagaagccgtttgcctgcgacatttgcgggaggaaattcgcacagaacgcgaccagaaccaaacacaccaaaatccatcttaggcaaaaggatgcggcccgggctccggaccgaaaaaaaagagaaaggtaaacggcgggggaggatcacggaccctggttacatttaaggacgtttttgtagacttcacgagggaggaatggaagctgttggacaccgcccagcaaatcgtgtatcgaaatgtaatgttggaaaattataaaaatctggtttccctcggctaccaattgacaaaaccagacgtcatcctcagactggaaaaaggggaagaaccttggcttgtctga

SEQ ID NO: 991 - DNA, 2690 bp, Synthetic construct
  misc_feature 1..2690: note = 3xFLAG-DNMT3AL-XTEN80-SV40 NLS-ZFP-SV40 NLS-KRAB (DNA sequence)
  source 1..2690: mol_type = other DNA
atgcacgatcaggagtttgacccccctaaggtgtacccacccgtgccagccgagaagaggaagcccatccgcgtgctgtccctgttcgacggcatcgccacaggcctgctggtgctgaaggatctgggcatccaggtggacagatatatcgcctccgaggtgtgcgaggattctatcaccgtgggcatggtgaggcaccagggcaagatcatgtacgtgggcgacgtgcgcagcgtgacacagaagcacatccaggagtggggacccttcgacctggtcatcggaggcagcccctgtaatgacctgtccatcgtgaaccctgcaaggaagggcctgtatgagggaaccggcagactgttctttgagttctacaggctgctgcacgacgcccgccctaaggagggcgatgacaggccattcttttggctgtttgagaacgtggtggccatgggcgtgagcgacaagcgggatatctccagattcctggagtctaatcccgtgatgatcgatgcaaaggaggtgtctgccgcacacagggcaaggtacttttggggaaatctgcctggcatgaaccgcccactggccagcaccgtgaacgacaagctggagctgcaggagtgcctggagcacggaaggatcgccaagttctccaaggtgcggacaatcaccacaagatctaacagcatcaagcagggcaaggatcagcacttccccgtgttcatgaatgagaaggaggacatcctgtggtgtaccgagatggagcgcgtgttcggctttccagtgcactatacagacgtgagcaatatgagccggctggcaaggcagagactgctgggccggtcctggtctgtgccagtgatcagacacctgttcgcccccctgaaggagtactttgcctgcgtgtctagcggcaactctaatgccaacagcagaggcccttccttttcctctggcctggtgccactgtctctgaggggcagccacatgggccccatggagatctacaagaccgtgtccgcctggaagaggcagcctgtgcgcgtgctgtctctgttccgcaacatcgacaaggtgctgaagagcctgggctttctggagagcggatccggatctggaggaggcaccctgaagtatgtggaggatgtgacaaatgtggtgcggagagatgtggagaagtggggccccttcgatctggtgtacggatccacccagccactgggaagctcctgcgataggtgtccaggatggtatatgttccagtttcacagaatcctgcagtacgcactgccaaggcaggagagccagcgccctttcttttggatctttatggacaacctgctgctgacagaggatgaccaggagacaacaacccgcttcctgcagacagaggcagtgaccctgcaggatgtgaggggacgcgactatcagaatgccatgcgggtgtggtctaacatccctggcctgaagagcaagcacgcccccctgacccctaaggaggaggagtacctgcaggcccaggtgcggagcagatccaagctggatgcccctaaggtggacctgctggtgaagaattgtctgctgccactgcgggagtacttcaagtactttagtcagaatagcctgccactgggtggacctagctctggagccccgcctccgtcaggtggatctcctgcaggtagcccaacttccacggaagagggcacgtctgagagtgcgactcctgagagcgggcctggcacaagtactgagcccagcgaaggttctgcacccgggtctccagctgggagccctacctcaacagaggaaggtaccagcacagagccttctgagggtagcgctcctggcacgtccaccgaaccgtccgaggggatggcaccgaagaaaaaacgcaaagttggtcgagcggccatggcagaacgaccctttcagtgccgaatttgcatgcggaactttagtcgcagtgacaccctgagcgagcatattcgcacgcatacgggagagaagccatttgcatgcgacatctgcggtagaaagtttgcgaggcgctggacgttggtaggccacacgaaaatccatacaggctcccagaaacccttccagtgcagaatttgtatgcgcaattttagtgacagaagtaacttgtcccgacatataaggacgcacaccggcgaaaaaccgtttgcctgtgatatctgtggtcggaaattcgcccagtccggtgacttgacacggcataccaaaatacacactggaagccaaaagccttttcagtgtcgcatatgtatgcgcaacttcagccagagtagtgacctttcacggcatatacggacgcatacgggtgagaaacccttcgcctgtgacatttgcgggcgaaagtttgcatatcattggtacctgaaaaaacatacgaaaatacatttgagacaaaaagatgcagcccgggctccggaccgaaaaaaaagagaaaggtaaacggcgggggaggatcacggaccctggttacatttaaggacgtttttgtagacttcacgagggaggaatggaagctgttggacaccgcccagcaaatcgtgtatcgaaatgtaatgttggaaaattataaaaatctggtttccctcggctaccaattgacaaaaccagacgtcatcctcagactggaaaaaggggaagaaccttggcttgtctga

SEQ ID NO: 992 - DNA, 2690 bp, Synthetic construct
  misc_feature 1..2690: note = 3xFLAG-DNMT3AL-XTEN80-SV40 NLS-ZFP-SV40 NLS-KRAB (DNA sequence)
  source 1..2690: mol_type = other DNA
atgcacgatcaggagtttgacccccctaaggtgtacccacccgtgccagccgagaagaggaagcccatccgcgtgctgtccctgttcgacggcatcgccacaggcctgctggtgctgaaggatctgggcatccaggtggacagatatatcgcctccgaggtgtgcgaggattctatcaccgtgggcatggtgaggcaccagggcaagatcatgtacgtgggcgacgtgcgcagcgtgacacagaagcacatccaggagtggggacccttcgacctggtcatcggaggcagcccctgtaatgacctgtccatcgtgaaccctgcaaggaagggcctgtatgagggaaccggcagactgttctttgagttctacaggctgctgcacgacgcccgccctaaggagggcgatgacaggccattcttttggctgtttgagaacgtggtggccatgggcgtgagcgacaagcgggatatctccagattcctggagtctaatcccgtgatgatcgatgcaaaggaggtgtctgccgcacacagggcaaggtacttttggggaaatctgcctggcatgaaccgcccactggccagcaccgtgaacgacaagctggagctgcaggagtgcctggagcacggaaggatcgccaagttctccaaggtgcggacaatcaccacaagatctaacagcatcaagcagggcaaggatcagcacttccccgtgttcatgaatgagaaggaggacatcctgtggtgtaccgagatggagcgcgtgttcggctttccagtgcactatacagacgtgagcaatatgagccggctggcaaggcagagactgctgggccggtcctggtctgtgccagtgatcagacacctgttcgcccccctgaaggagtactttgcctgcgtgtctagcggcaactctaatgccaacagcagaggcccttccttttcctctggcctggtgccactgtctctgaggggcagccacatgggccccatggagatctacaagaccgtgtccgcctggaagaggcagcctgtgcgcgtgctgtctctgttccgcaacatcgacaaggtgctgaagagcctgggctttctggagagcggatccggatctggaggaggcaccctgaagtatgtggaggatgtgacaaatgtggtgcggagagatgtggagaagtggggccccttcgatctggtgtacggatccacccagccactgggaagctcctgcgataggtgtccaggatggtatatgttccagtttcacagaatcctgcagtacgcactgccaaggcaggagagccagcgccctttcttttggatctttatggacaacctgctgctgacagaggatgaccaggagacaacaacccgcttcctgcagacagaggcagtgaccctgcaggatgtgaggggacgcgactatcagaatgccatgcgggtgtggtctaacatccctggcctgaagagcaagcacgcccccctgacccctaaggaggaggagtacctgcaggcccaggtgcggagcagatccaagctggatgcccctaaggtggacctgctggtgaagaattgtctgctgccactgcgggagtacttcaagtactttagtcagaatagcctgccactgggtggacctagctctggagccccgcctccgtcaggtggatctcctgcaggtagcccaacttccacggaagagggcacgtctgagagtgcgactcctgagagcgggcctggcacaagtactgagcccagcgaaggttctgcacccgggtctccagctgggagccctacctcaacagaggaaggtaccagcacagagccttctgagggtagcgctcctggcacgtccaccgaaccgtccgaggggatggcaccgaagaaaaaacgcaaagttggtcgagctgccatggccgagcgcccgtttcaatgcagaatatgtatgaggaacttctctagaagcgccaatcttgcgcgacacattagaactcacacaggcgagaaacctttcgcctgtgacatctgcggcagaaaatttgcgcgaagtgataacttgcgcgagcacacaaaaatccataccggttcccaaaagccctttcaatgtaggatttgcatgaggaacttttcaagaccatacacgctgagactccacattcgcacgcatacgggagaaaaaccatttgcttgtgacatatgcggccgaaagtttgcacaccgatccaacttgaataagcataccaaaatccatacggggtctcagaaacccttccagtgtcggatttgtatgcgaaacttctctcagagtggttctcttacgcgccacattagaacccacacgggggaaaagccattcgcgtgcgatatctgtggccggaaatttgctacttccgcaaatctttctcgacatacaaagatacatcttagacagaaggatgcggcacgggctccggaccgaaaaaaaagagaaaggtaaacggcgggggaggatcacggaccctggttacatttaaggacgtttttgtagacttcacgagggaggaatggaagctgttggacaccgcccagcaaatcgtgtatcgaaatgtaatgttggaaaattataaaaatctggtttccctcggctaccaattgacaaaaccagacgtcatcctcagactggaaaaaggggaagaaccttggcttgtctga

SEQ ID NO: 993 - DNA, 2678 bp, Synthetic construct
  misc_feature 1..2678: note = 3xFLAG-DNMT3AL-XTEN80-SV40 NLS-ZFP-SV40 NLS-KRAB (DNA sequence)
  source 1..2678: mol_type = other DNA
atgcacgatcaggagtttgacccccctaaggtgtacccacccgtgccagccgagaagaggaagcccatccgcgtgctgtccctgttcgacggcatcgccacaggcctgctggtgctgaaggatctgggcatccaggtggacagatatatcgcctccgaggtgtgcgaggattctatcaccgtgggcatggtgaggcaccagggcaagatcatgtacgtgggcgacgtgcgcagcgtgacacagaagcacatccaggagtggggacccttcgacctggtcatcggaggcagcccctgtaatgacctgtccatcgtgaaccctgcaaggaagggcctgtatgagggaaccggcagactgttctttgagttctacaggctgctgcacgacgcccgccctaaggagggcgatgacaggccattcttttggctgtttgagaacgtggtggccatgggcgtgagcgacaagcgggatatctccagattcctggagtctaatcccgtgatgatcgatgcaaaggaggtgtctgccgcacacagggcaaggtacttttggggaaatctgcctggcatgaaccgcccactggccagcaccgtgaacgacaagctggagctgcaggagtgcctggagcacggaaggatcgccaagttctccaaggtgcggacaatcaccacaagatctaacagcatcaagcagggcaaggatcagcacttccccgtgttcatgaatgagaaggaggacatcctgtggtgtaccgagatggagcgcgtgttcggctttccagtgcactatacagacgtgagcaatatgagccggctggcaaggcagagactgctgggccggtcctggtctgtgccagtgatcagacacctgttcgcccccctgaaggagtactttgcctgcgtgtctagcggcaactctaatgccaacagcagaggcccttccttttcctctggcctggtgccactgtctctgaggggcagccacatgggccccatggagatctacaagaccgtgtccgcctggaagaggcagcctgtgcgcgtgctgtctctgttccgcaacatcgacaaggtgctgaagagcctgggctttctggagagcggatccggatctggaggaggcaccctgaagtatgtggaggatgtgacaaatgtggtgcggagagatgtggagaagtggggccccttcgatctggtgtacggatccacccagccactgggaagctcctgcgataggtgtccaggatggtatatgttccagtttcacagaatcctgcagtacgcactgccaaggcaggagagccagcgccctttcttttggatctttatggacaacctgctgctgacagaggatgaccaggagacaacaacccgcttcctgcagacagaggcagtgaccctgcaggatgtgaggggacgcgactatcagaatgccatgcgggtgtggtctaacatccctggcctgaagagcaagcacgcccccctgacccctaaggaggaggagtacctgcaggcccaggtgcggagcagatccaagctggatgcccctaaggtggacctgctggtgaagaattgtctgctgccactgcgggagtacttcaagtactttagtcagaatagcctgccactgggtggacctagctctggagccccgcctccgtcaggtggatctcctgcaggtagcccaacttccacggaagagggcacgtctgagagtgcgactcctgagagcgggcctggcacaagtactgagcccagcgaaggttctgcacccgggtctccagctgggagccctacctcaacagaggaaggtaccagcacagagccttctgagggtagcgctcctggcacgtccaccgaaccgtccgaggggatggcaccgaagaaaaaacgcaaagttggtcgattggagcccggtgaaaaaccatatgcctgtccagagtgtggaaaaagttttagcagaagcgacgacctggttaggcatcaacgaactcacacaggggaaaagccgtacaaatgtcctgaatgcggaaagtcattctccacttcaggtagcctcgtgcgacatcagcgcacacatactggcgaaaaaccttataagtgtccggaatgcggcaagagtttttctagaagtgataagctcgtgcgacaccagcggacgcacacgggtgagaagccctacgcctgcccagagtgcggaaagtcctttagtaggtctgacgaactggtccggcaccaacgaacccatacaggggagaaaccctacaaatgtccagagtgcgggaaatcattttcaacgtctcacagcttgacggaacatcagaggacccatacaggcgaaaagccttacaaatgtccggagtgcggaaagtctttcagccgggctgataatctcacggagcaccaaagaacccacacgggtaagaaaacctctgctccggaccgaaaaaaaagagaaaggtaaacggcgggggaggatcacggaccctggttacatttaaggacgtttttgtagacttcacgagggaggaatggaagctgttggacaccgcccagcaaatcgtgtatcgaaatgtaatgttggaaaattataaaaatctggtttccctcggctaccaattgacaaaaccagacgtcatcctcagactggaaaaaggggaagaaccttggcttgtctga

SEQ ID NO: 994 - DNA, 2678 bp, Synthetic construct
  misc_feature 1..2678: note = 3xFLAG-DNMT3AL-XTEN80-SV40 NLS-ZFP-SV40 NLS-KRAB (DNA sequence)
  source 1..2678: mol_type = other DNA
atgcacgatcaggagtttgacccccctaaggtgtacccacccgtgccagccgagaagaggaagcccatccgcgtgctgtccctgttcgacggcatcgccacaggcctgctggtgctgaaggatctgggcatccaggtggacagatatatcgcctccgaggtgtgcgaggattctatcaccgtgggcatggtgaggcaccagggcaagatcatgtacgtgggcgacgtgcgcagcgtgacacagaagcacatccaggagtggggacccttcgacctggtcatcggaggcagcccctgtaatgacctgtccatcgtgaaccctgcaaggaagggcctgtatgagggaaccggcagactgttctttgagttctacaggctgctgcacgacgcccgccctaaggagggcgatgacaggccattcttttggctgtttgagaacgtggtggccatgggcgtgagcgacaagcgggatatctccagattcctggagtctaatcccgtgatgatcgatgcaaaggaggtgtctgccgcacacagggcaaggtacttttggggaaatctgcctggcatgaaccgcccactggccagcaccgtgaacgacaagctggagctgcaggagtgcctggagcacggaaggatcgccaagttctccaaggtgcggacaatcaccacaagatctaacagcatcaagcagggcaaggatcagcacttccccgtgttcatgaatgagaaggaggacatcctgtggtgtaccgagatggagcgcgtgttcggctttccagtgcactatacagacgtgagcaatatgagccggctggcaaggcagagactgctgggccggtcctggtctgtgccagtgatcagacacctgttcgcccccctgaaggagtactttgcctgcgtgtctagcggcaactctaatgccaacagcagaggcccttccttttcctctggcctggtgccactgtctctgaggggcagccacatgggccccatggagatctacaagaccgtgtccgcctggaagaggcagcctgtgcgcgtgctgtctctgttccgcaacatcgacaaggtgctgaagagcctgggctttctggagagcggatccggatctggaggaggcaccctgaagtatgtggaggatgtgacaaatgtggtgcggagagatgtggagaagtggggccccttcgatctggtgtacggatccacccagccactgggaagctcctgcgataggtgtccaggatggtatatgttccagtttcacagaatcctgcagtacgcactgccaaggcaggagagccagcgccctttcttttggatctttatggacaacctgctgctgacagaggatgaccaggagacaacaacccgcttcctgcagacagaggcagtgaccctgcaggatgtgaggggacgcgactatcagaatgccatgcgggtgtggtctaacatccctggcctgaagagcaagcacgcccccctgacccctaaggaggaggagtacctgcaggcccaggtgcggagcagatccaagctggatgcccctaaggtggacctgctggtgaagaattgtctgctgccactgcgggagtacttcaagtactttagtcagaatagcctgccactgggtggacctagctctggagccccgcctccgtcaggtggatctcctgcaggtagcccaacttccacggaagagggcacgtctgagagtgcgactcctgagagcgggcctggcacaagtactgagcccagcgaaggttctgcacccgggtctccagctgggagccctacctcaacagaggaaggtaccagcacagagccttctgagggtagcgctcctggcacgtccaccgaaccgtccgaggggatggcaccgaagaaaaaacgcaaagttggtcgattggagccgggagaaaagccatatgcctgtccggaatgcggcaaaagcttttcagaacggtcccatttgcgggaacatcagcgcacccataccggagaaaagccttacaagtgtcccgagtgtggtaagagcttttcaacttcccacagtctcactgaacatcagcgaactcacacaggcgaaaaaccatacaaatgcccggagtgtggaaagagtttttctcaagctgggcacttggccagccaccaaaggactcatacgggcgagaaaccgtatgcctgtccagaatgcgggaaatcattttctactagtcattcccttacggaacatcagagaacgcacaccggggagaagccatacaagtgtccggagtgcggaaaatcattctccgacccgggtcatctcgttcgccatcagaggactcatactggagagaaaccgtataaatgtcctgaatgcgggaagagcttttctacatctgggaaccttgtgcggcaccagcgaacccacacggggaaaaagacttctgctccggaccgaaaaaaaagagaaaggtaaacggcgggggaggatcacggaccctggttacatttaaggacgtttttgtagacttcacgagggaggaatggaagctgttggacaccgcccagcaaatcgtgtatcgaaatgtaatgttggaaaattataaaaatctggtttccctcggctaccaattgacaaaaccagacgtcatcctcagactggaaaaaggggaagaaccttggcttgtctga

SEQ ID NO: 995 - DNA, 2678 bp, Synthetic construct
  misc_feature 1..2678: note = 3xFLAG-DNMT3AL-XTEN80-SV40 NLS-ZFP-SV40 NLS-KRAB (DNA sequence)
  source 1..2678: mol_type = other DNA
atgcacgatcaggagtttgacccccctaaggtgtacccacccgtgccagccgagaagaggaagcccatccgcgtgctgtccctgttcgacggcatcgccacaggcctgctggtgctgaaggatctgggcatccaggtggacagatatatcgcctccgaggtgtgcgaggattctatcaccgtgggcatggtgaggcaccagggcaagatcatgtacgtgggcgacgtgcgcagcgtgacacagaagcacatccaggagtggggacccttcgacctggtcatcggaggcagcccctgtaatgacctgtccatcgtgaaccctgcaaggaagggcctgtatgagggaaccggcagactgttctttgagttctacaggctgctgcacgacgcccgccctaaggagggcgatgacaggccattcttttggctgtttgagaacgtggtggccatgggcgtgagcgacaagcgggatatctccagattcctggagtctaatcccgtgatgatcgatgcaaaggaggtgtctgccgcacacagggcaaggtacttttggggaaatctgcctggcatgaaccgcccactggccagcaccgtgaacgacaagctggagctgcaggagtgcctggagcacggaaggatcgccaagttctccaaggtgcggacaatcaccacaagatctaacagcatcaagcagggcaaggatcagcacttccccgtgttcatgaatgagaaggaggacatcctgtggtgtaccgagatggagcgcgtgttcggctttccagtgcactatacagacgtgagcaatatgagccggctggcaaggcagagactgctgggccggtcctggtctgtgccagtgatcagacacctgttcgcccccctgaaggagtactttgcctgcgtgtctagcggcaactctaatgccaacagcagaggcccttccttttcctctggcctggtgccactgtctctgaggggcagccacatgggccccatggagatctacaagaccgtgtccgcctggaagaggcagcctgtgcgcgtgctgtctctgttccgcaacatcgacaaggtgctgaagagcctgggctttctggagagcggatccggatctggaggaggcaccctgaagtatgtggaggatgtgacaaatgtggtgcggagagatgtggagaagtggggccccttcgatctggtgtacggatccacccagccactgggaagctcctgcgataggtgtccaggatggtatatgttccagtttcacagaatcctgcagtacgcactgccaaggcaggagagccagcgccctttcttttggatctttatggacaacctgctgctgacagaggatgaccaggagacaacaacccgcttcctgcagacagaggcagtgaccctgcaggatgtgaggggacgcgactatcagaatgccatgcgggtgtggtctaacatccctggcctgaagagcaagcacgcccccctgacccctaaggaggaggagtacctgcaggcccaggtgcggagcagatccaagctggatgcccctaaggtggacctgctggtgaagaattgtctgctgccactgcgggagtacttcaagtactttagtcagaatagcctgccactgggtggacctagctctggagccccgcctccgtcaggtggatctcctgcaggtagcccaacttccacggaagagggcacgtctgagagtgcgactcctgagagcgggcctggcacaagtactgagcccagcgaaggttctgcacccgggtctccagctgggagccctacctcaacagaggaaggtaccagcacagagccttctgagggtagcgctcctggcacgtccaccgaaccgtccgaggggatggcaccgaagaaaaaacgcaaagttggtcgactggaaccgggtgaaaaaccctacgcttgtcccgagtgtgggaaatcattctcaagggcagataatcttacggaacatcagcgcacacacaccggggaaaaaccctataagtgccctgagtgtggtaaatcattctctacgtcagggtcattggtgcgccatcagaggacccatacaggcgaaaaaccgtataagtgccccgaatgcggtaaaagcttcagcagaaaagataacttgaaaaatcaccaacgcactcacacgggagaaaaaccgtacgcatgcccggagtgcggcaagagtttcagtcagagtagctcacttgttcgccaccaaagaacccacacaggcgaaaagccctacaagtgtcctgaatgtggaaagagtttcagtcgaagtgataaattggttaggcaccaaagaacacacactggagagaaaccgtacaagtgtccagaatgtggcaagtctttttctgattctggaaatttgcgcgtccatcaaaggactcatactgggaaaaagacgtccgctccggaccgaaaaaaaagagaaaggtaaacggcgggggaggatcacggaccctggttacatttaaggacgtttttgtagacttcacgagggaggaatggaagctgttggacaccgcccagcaaatcgtgtatcgaaatgtaatgttggaaaattataaaaatctggtttccctcggctaccaattgacaaaaccagacgtcatcctcagactggaaaaaggggaagaaccttggcttgtctga

SEQ ID NO: 996 - DNA, 2678 bp, Synthetic construct
  misc_feature 1..2678: note = 3xFLAG-DNMT3AL-XTEN80-SV40 NLS-ZFP-SV40 NLS-KRAB (DNA sequence)
  source 1..2678: mol_type = other DNA
atgcacgatcaggagtttgacccccctaaggtgtacccacccgtgccagccgagaagaggaagcccatccgcgtgctgtccctgttcgacggcatcgccacaggcctgctggtgctgaaggatctgggcatccaggtggacagatatatcgcctccgaggtgtgcgaggattctatcaccgtgggcatggtgaggcaccagggcaagatcatgtacgtgggcgacgtgcgcagcgtgacacagaagcacatccaggagtggggacccttcgacctggtcatcggaggcagcccctgtaatgacctgtccatcgtgaaccctgcaaggaagggcctgtatgagggaaccggcagactgttctttgagttctacaggctgctgcacgacgcccgccctaaggagggcgatgacaggccattcttttggctgtttgagaacgtggtggccatgggcgtgagcgacaagcgggatatctccagattcctggagtctaatcccgtgatgatcgatgcaaaggaggtgtctgccgcacacagggcaaggtacttttggggaaatctgcctggcatgaaccgcccactggccagcaccgtgaacgacaagctggagctgcaggagtgcctggagcacggaaggatcgccaagttctccaaggtgcggacaatcaccacaagatctaacagcatcaagcagggcaaggatcagcacttccccgtgttcatgaatgagaaggaggacatcctgtggtgtaccgagatggagcgcgtgttcggctttccagtgcactatacagacgtgagcaatatgagccggctggcaaggcagagactgctgggccggtcctggtctgtgccagtgatcagacacctgttcgcccccctgaaggagtactttgcctgcgtgtctagcggcaactctaatgccaacagcagaggcccttccttttcctctggcctggtgccactgtctctgaggggcagccacatgggccccatggagatctacaagaccgtgtccgcctggaagaggcagcctgtgcgcgtgctgtctctgttccgcaacatcgacaaggtgctgaagagcctgggctttctggagagcggatccggatctggaggaggcaccctgaagtatgtggaggatgtgacaaatgtggtgcggagagatgtggagaagtggggccccttcgatctggtgtacggatccacccagccactgggaagctcctgcgataggtgtccaggatggtatatgttccagtttcacagaatcctgcagtacgcactgccaaggcaggagagccagcgccctttcttttggatctttatggacaacctgctgctgacagaggatgaccaggagacaacaacccgcttcctgcagacagaggcagtgaccctgcaggatgtgaggggacgcgactatcagaatgccatgcgggtgtggtctaacatccctggcctgaagagcaagcacgcccccctgacccctaaggaggaggagtacctgcaggcccaggtgcggagcagatccaagctggatgcccctaaggtggacctgctggtgaagaattgtctgctgccactgcgggagtacttcaagtactttagtcagaatagcctgccactgggtggacctagctctggagccccgcctccgtcaggtggatctcctgcaggtagcccaacttccacggaagagggcacgtctgagagtgcgactcctgagagcgggcctggcacaagtactgagcccagcgaaggttctgcacccgggtctccagctgggagccctacctcaacagaggaaggtaccagcacagagccttctgagggtagcgctcctggcacgtccaccgaaccgtccgaggggatggcaccgaagaaaaaacgcaaagttggtcgactcgaaccaggggaaaagccatacgcttgccccgagtgtggaaaatctttctctcagtcaagctcccttgtcagacaccagagaacccatacgggtgagaaaccatacaagtgcccagagtgcggcaaaagcttcagtcagagtggcgatctgcgccggcatcaaagaactcacactggagaaaagccctataagtgccccgaatgtggaaagagtttttccaggagtgacgaaagaaagagacaccagcggactcacaccggcgagaaaccatacgcatgccccgagtgcggaaaaagtttttcccaccgcacaacccttaccaatcatcaacgcacgcacacaggggagaaaccctacaagtgcccggagtgtggcaagtcattcagccgaagtgaccacctcactaaccaccaaaggactcacacaggagaaaaaccctacaaatgtccggagtgcggaaaatctttttccacgtccggtgagctggtccgccatcaacgaacccatactggtaaaaaaactagcgctccggaccgaaaaaaaagagaaaggtaaacggcgggggaggatcacggaccctggttacatttaaggacgtttttgtagacttcacgagggaggaatggaagctgttggacaccgcccagcaaatcgtgtatcgaaatgtaatgttggaaaattataaaaatctggtttccctcggctaccaattgacaaaaccagacgtcatcctcagactggaaaaaggggaagaaccttggcttgtctga

SEQ ID NO: 997 - DNA, 2678 bp, Synthetic construct
  misc_feature 1..2678: note = 3xFLAG-DNMT3AL-XTEN80-SV40 NLS-ZFP-SV40 NLS-KRAB (DNA sequence)
  source 1..2678: mol_type = other DNA
atgcacgatcaggagtttgacccccctaaggtgtacccacccgtgccagccgagaagaggaagcccatccgcgtgctgtccctgttcgacggcatcgccacaggcctgctggtgctgaaggatctgggcatccaggtggacagatatatcgcctccgaggtgtgcgaggattctatcaccgtgggcatggtgaggcaccagggcaagatcatgtacgtgggcgacgtgcgcagcgtgacacagaagcacatccaggagtggggacccttcgacctggtcatcggaggcagcccctgtaatgacctgtccatcgtgaaccctgcaaggaagggcctgtatgagggaaccggcagactgttctttgagttctacaggctgctgcacgacgcccgccctaaggagggcgatgacaggccattcttttggctgtttgagaacgtggtggccatgggcgtgagcgacaagcgggatatctccagattcctggagtctaatcccgtgatgatcgatgcaaaggaggtgtctgccgcacacagggcaaggtacttttggggaaatctgcctggcatgaaccgcccactggccagcaccgtgaacgacaagctggagctgcaggagtgcctggagcacggaaggatcgccaagttctccaaggtgcggacaatcaccacaagatctaacagcatcaagcagggcaaggatcagcacttccccgtgttcatgaatgagaaggaggacatcctgtggtgtaccgagatggagcgcgtgttcggctttccagtgcactatacagacgtgagcaatatgagccggctggcaaggcagagactgctgggccggtcctggtctgtgccagtgatcagacacctgttcgcccccctgaaggagtactttgcctgcgtgtctagcggcaactctaatgccaacagcagaggcccttccttttcctctggcctggtgccactgtctctgaggggcagccacatgggccccatggagatctacaagaccgtgtccgcctggaagaggcagcctgtgcgcgtgctgtctctgttccgcaacatcgacaaggtgctgaagagcctgggctttctggagagcggatccggatctggaggaggcaccctgaagtatgtggaggatgtgacaaatgtggtgcggagagatgtggagaagtggggccccttcgatctggtgtacggatccacccagccactgggaagctcctgcgataggtgtccaggatggtatatgttccagtttcacagaatcctgcagtacgcactgccaaggcaggagagccagcgccctttcttttggatctttatggacaacctgctgctgacagaggatgaccaggagacaacaacccgcttcctgcagacagaggcagtgaccctgcaggatgtgaggggacgcgactatcagaatgccatgcgggtgtggtctaacatccctggcctgaagagcaagcacgcccccctgacccctaaggaggaggagtacctgcaggcccaggtgcggagcagatccaagctggatgcccctaaggtggacctgctggtgaagaattgtctgctgccactgcgggagtacttcaagtactttagtcagaatagcctgccactgggtggacctagctctggagccccgcctccgtcaggtggatctcctgcaggtagcccaacttccacggaagagggcacgtctgagagtgcgactcctgagagcgggcctggcacaagtactgagcccagcgaaggttctgcacccgggtctccagctgggagccctacctcaacagaggaaggtaccagcacagagccttctgagggtagcgctcctggcacgtccaccgaaccgtccgaggggatggcaccgaagaaaaaacgcaaagttggtcgactggaacccggggagaagccgtacgcttgcccagagtgcggaaagagcttctctcagagcggagaccttagacgccaccagcgaacccacaccggcgaaaaaccgtataaatgcccggaatgcggcaagagttttagtcggtccgatgagcgaaagaggcatcaacgaacccatacgggagagaaaccctacaagtgccctgagtgtggtaagtcattttcccacagaacgacgttgacgaatcaccagagaacccatacgggtgagaaaccttacgcttgcccggagtgcggcaaaagcttcagccggagtgatcacttgaccaatcatcagaggacacacacgggtgagaagccctacaaatgtcccgaatgcggcaagtctttctcaacgtcaggcgaactcgtccggcaccagcgaacacatacgggagaaaagccgtacaaatgtccggaatgcggaaagtcattttcacggtcagatgacttggtgcgacaccagcgcactcacacaggcaagaagacctcagctccggaccgaaaaaaaagagaaaggtaaacggcgggggaggatcacggaccctggttacatttaaggacgtttttgtagacttcacgagggaggaatggaagctgttggacaccgcccagcaaatcgtgtatcgaaatgtaatgttggaaaattataaaaatctggtttccctcggctaccaattgacaaaaccagacgtcatcctcagactggaaaaaggggaagaaccttggcttgtctga

SEQ ID NO: 998 - DNA, 2678 bp, Synthetic construct
  misc_feature 1..2678: note = 3xFLAG-DNMT3AL-XTEN80-SV40 NLS-ZFP-SV40 NLS-KRAB (DNA sequence)
  source 1..2678: mol_type = other DNA
atgcacgatcaggagtttgacccccctaaggtgtacccacccgtgccagccgagaagaggaagcccatccgcgtgctgtccctgttcgacggcatcgccacaggcctgctggtgctgaaggatctgggcatccaggtggacagatatatcgcctccgaggtgtgcgaggattctatcaccgtgggcatggtgaggcaccagggcaagatcatgtacgtgggcgacgtgcgcagcgtgacacagaagcacatccaggagtggggacccttcgacctggtcatcggaggcagcccctgtaatgacctgtccatcgtgaaccctgcaaggaagggcctgtatgagggaaccggcagactgttctttgagttctacaggctgctgcacgacgcccgccctaaggagggcgatgacaggccattcttttggctgtttgagaacgtggtggccatgggcgtgagcgacaagcgggatatctccagattcctggagtctaatcccgtgatgatcgatgcaaaggaggtgtctgccgcacacagggcaaggtacttttggggaaatctgcctggcatgaaccgcccactggccagcaccgtgaacgacaagctggagctgcaggagtgcctggagcacggaaggatcgccaagttctccaaggtgcggacaatcaccacaagatctaacagcatcaagcagggcaaggatcagcacttccccgtgttcatgaatgagaaggaggacatcctgtggtgtaccgagatggagcgcgtgttcggctttccagtgcactatacagacgtgagcaatatgagccggctggcaaggcagagactgctgggccggtcctggtctgtgccagtgatcagacacctgttcgcccccctgaaggagtactttgcctgcgtgtctagcggcaactctaatgccaacagcagaggcccttccttttcctctggcctggtgccactgtctctgaggggcagccacatgggccccatggagatctacaagaccgtgtccgcctggaagaggcagcctgtgcgcgtgctgtctctgttccgcaacatcgacaaggtgctgaagagcctgggctttctggagagcggatccggatctggaggaggcaccctgaagtatgtggaggatgtgacaaatgtggtgcggagagatgtggagaagtggggccccttcgatctggtgtacggatccacccagccactgggaagctcctgcgataggtgtccaggatggtatatgttccagtttcacagaatcctgcagtacgcactgccaaggcaggagagccagcgccctttcttttggatctttatggacaacctgctgctgacagaggatgaccaggagacaacaacccgcttcctgcagacagaggcagtgaccctgcaggatgtgaggggacgcgactatcagaatgccatgcgggtgtggtctaacatccctggcctgaagagcaagcacgcccccctgacccctaaggaggaggagtacctgcaggcccaggtgcggagcagatccaagctggatgcccctaaggtggacctgctggtgaagaattgtctgctgccactgcgggagtacttcaagtactttagtcagaatagcctgccactgggtggacctagctctggagccccgcctccgtcaggtggatctcctgcaggtagcccaacttccacggaagagggcacgtctgagagtgcgactcctgagagcgggcctggcacaagtactgagcccagcgaaggttctgcacccgggtctccagctgggagccctacctcaacagaggaaggtaccagcacagagccttctgagggtagcgctcctggcacgtccaccgaaccgtccgaggggatggcaccgaagaaaaaacgcaaagttggtcgactggagcctggtgagaagccgtatgcatgtcctgagtgtgggaagtcatttagtcagagggcccacttggaacgacaccaaaggacccacactggtgaaaaaccctacaaatgcccagagtgtggtaagtctttttcacagctggcccacctgagagcacaccagcgaactcatacgggcgagaaaccatacaagtgtccagagtgcggaaagtcattctcagatcccggccacttggtgcgacatcagagaacgcacacaggggagaagccttatgcttgcccggaatgcgggaagtctttcagccgccgaagtgcttgtcgaaggcaccaacggacccataccggtgagaaaccatataagtgcccagagtgtggaaagagttttagtcgatccgatcacctgactacgcaccagcggacgcacacaggagagaaaccgtataagtgccctgaatgcggtaagagcttctctcaatcaagctcactggttaggcaccaacgcactcataccggcaagaagacgtcagctccggaccgaaaaaaaagagaaaggtaaacggcgggggaggatcacggaccctggttacatttaaggacgtttttgtagacttcacgagggaggaatggaagctgttggacaccgcccagcaaatcgtgtatcgaaatgtaatgttggaaaattataaaaatctggtttccctcggctaccaattgacaaaaccagacgtcatcctcagactggaaaaaggggaagaaccttggcttgtctga

SEQ ID NO: 999 - DNA, 2678 bp, Synthetic construct
  misc_feature 1..2678: note = 3xFLAG-DNMT3AL-XTEN80-SV40 NLS-ZFP-SV40 NLS-KRAB (DNA sequence)
  source 1..2678: mol_type = other DNA
atgcacgatcaggagtttgacccccctaaggtgtacccacccgtgccagccgagaagaggaagcccatccgcgtgctgtccctgttcgacggcatcgccacaggcctgctggtgctgaaggatctgggcatccaggtggacagatatatcgcctccgaggtgtgcgaggattctatcaccgtgggcatggtgaggcaccagggcaagatcatgtacgtgggcgacgtgcgcagcgtgacacagaagcacatccaggagtggggacccttcgacctggtcatcggaggcagcccctgtaatgacctgtccatcgtgaaccctgcaaggaagggcctgtatgagggaaccggcagactgttctttgagttctacaggctgctgcacgacgcccgccctaaggagggcgatgacaggccattcttttggctgtttgagaacgtggtggccatgggcgtgagcgacaagcgggatatctccagattcctggagtctaatcccgtgatgatcgatgcaaaggaggtgtctgccgcacacagggcaaggtacttttggggaaatctgcctggcatgaaccgcccactggccagcaccgtgaacgacaagctggagctgcaggagtgcctggagcacggaaggatcgccaagttctccaaggtgcggacaatcaccacaagatctaacagcatcaagcagggcaaggatcagcacttccccgtgttcatgaatgagaaggaggacatcctgtggtgtaccgagatggagcgcgtgttcggctttccagtgcactatacagacgtgagcaatatgagccggctggcaaggcagagactgctgggccggtcctggtctgtgccagtgatcagacacctgttcgcccccctgaaggagtactttgcctgcgtgtctagcggcaactctaatgccaacagcagaggcccttccttttcctctggcctggtgccactgtctctgaggggcagccacatgggccccatggagatctacaagaccgtgtccgcctggaagaggcagcctgtgcgcgtgctgtctctgttccgcaacatcgacaaggtgctgaagagcctgggctttctggagagcggatccggatctggaggaggcaccctgaagtatgtggaggatgtgacaaatgtggtgcggagagatgtggagaagtggggccccttcgatctggtgtacggatccacccagccactgggaagctcctgcgataggtgtccaggatggtatatgttccagtttcacagaatcctgcagtacgcactgccaaggcaggagagccagcgccctttcttttggatctttatggacaacctgctgctgacagaggatgaccaggagacaacaacccgcttcctgcagacagaggcagtgaccctgcaggatgtgaggggacgcgactatcagaatgccatgcgggtgtggtctaacatccctggcctgaagagcaagcacgcccccctgacccctaaggaggaggagtacctgcaggcccaggtgcggagcagatccaagctggatgcccctaaggtggacctgctggtgaagaattgtctgctgccactgcgggagtacttcaagtactttagtcagaatagcctgccactgggtggacctagctctggagccccgcctccgtcaggtggatctcctgcaggtagcccaacttccacggaagagggcacgtctgagagtgcgactcctgagagcgggcctggcacaagtactgagcccagcgaaggttctgcacccgggtctccagctgggagccctacctcaacagaggaaggtaccagcacagagccttctgagggtagcgctcctggcacgtccaccgaaccgtccgaggggatggcaccgaagaaaaaacgcaaagttggtcgacttgagccgggggaaaagccttatgcttgcccagagtgtggcaagagcttctcccaaagttcaaacctcgtccgacaccaaaggactcacacgggcgaaaaaccgtataaatgccccgagtgcggaaagtcattttccaggtccgacgatctggtccgccaccagcgcactcatacgggggaaaagccctataagtgccctgagtgcggcaagagcttctcaactcacctggatctcattcgccatcaacgcacacatacaggggagaagccttacgcttgtccagagtgcggcaagtctttcagtacgagcggaaacctgacggaacaccagcgaacccacacgggcgagaagccatataaatgtcccgaatgtggaaaatcattctctcgccgatctgcgtgccgccggcatcagaggacacataccggagaaaagccgtacaaatgccccgagtgtggaaaatcctttagcagaaatgatacacttaccgagcatcagaggacgcacactggaaaaaagacatctgctccggaccgaaaaaaaagagaaaggtaaacggcgggggaggatcacggaccctggttacatttaaggacgtttttgtagacttcacgagggaggaatggaagctgttggacaccgcccagcaaatcgtgtatcgaaatgtaatgttggaaaattataaaaatctggtttccctcggctaccaattgacaaaaccagacgtcatcctcagactggaaaaaggggaagaaccttggcttgtctga

SEQ ID NO: 1000 - protein, 898 aa, Synthetic construct
  REGION 1..898: note = 3xFLAG-DNMT3AL-XTEN80-SV40 NLS-ZFP-SV40 NLS-KRAB (AA sequence)
MHDQEFDPPKVYPPVPAEKRKPIRVLSLFDGIATGLLVLKDLGIQVDRYIASEVCEDSITVGMVRHQGKIMYVGDVRSVTQKHIQEWGPFDLVIGGSPCNDLSIVNPARKGLYEGTGRLFFEFYRLLHDARPKEGDDRPFFWLFENVVAMGVSDKRDISRFLESNPVMIDAKEVSAAHRARYFWGNLPGMNRPLASTVNDKLELQECLEHGRIAKFSKVRTITTRSNSIKQGKDQHFPVFMNEKEDILWCTEMERVFGFPVHYTDVSNMSRLARQRLLGRSWSVPVIRHLFAPLKEYFACVSSGNSNANSRGPSFSSGLVPLSLRGSHMGPMEIYKTVSAWKRQPVRVLSLFRNIDKVLKSLGFLESGSGSGGGTLKYVEDVTNVVRRDVEKWGPFDLVYGSTQPLGSSCDRCPGWYMFQFHRILQYALPRQESQRPFFWIFMDNLLLTEDDQETTTRFLQTEAVTLQDVRGRDYQNAMRVWSNIPGLKSKHAPLTPKEEEYLQAQVRSRSKLDAPKVDLLVKNCLLPLREYFKYFSQNSLPLGGPSSGAPPPSGGSPAGSPTSTEEGTSESATPESGPGTSTEPSEGSAPGSPAGSPTSTEEGTSTEPSEGSAPGTSTEPSEGMAPKKKRKVGRVPAAMAERPFQCRICMRNFSSEADRSRHIRTHTGEKPFACDICGRKFADRSNLTRHTKIHTGSQKPFQCRICMRNFSQSSDLSRHIRTHTGEKPFACDICGRKFAYHWYLKKHTKIHTGSQKPFQCRICMRNFSRSDSLSVHIRTHTGEKPFACDICGRKFAQNANRKTHTKIHLRQKDAARGSGPKKKRKVNGGGGSRTLVTFKDVFVDFTREEWKLLDTAQQIVYRNVMLENYKNLVSLGYQLTKPDVILRLEKGEEPWLV

SEQ ID NO: 1001 - protein, 898 aa, Synthetic construct
  REGION 1..898: note = 3xFLAG-DNMT3AL-XTEN80-SV40 NLS-ZFP-SV40 NLS-KRAB (AA sequence)
MHDQEFDPPKVYPPVPAEKRKPIRVLSLFDGIATGLLVLKDLGIQVDRYIASEVCEDSITVGMVRHQGKIMYVGDVRSVTQKHIQEWGPFDLVIGGSPCNDLSIVNPARKGLYEGTGRLFFEFYRLLHDARPKEGDDRPFFWLFENVVAMGVSDKRDISRFLESNPVMIDAKEVSAAHRARYFWGNLPGMNRPLASTVNDKLELQECLEHGRIAKFSKVRTITTRSNSIKQGKDQHFPVFMNEKEDILWCTEMERVFGFPVHYTDVSNMSRLARQRLLGRSWSVPVIRHLFAPLKEYFACVSSGNSNANSRGPSFSSGLVPLSLRGSHMGPMEIYKTVSAWKRQPVRVLSLFRNIDKVLKSLGFLESGSGSGGGTLKYVEDVTNVVRRDVEKWGPFDLVYGSTQPLGSSCDRCPGWYMFQFHRILQYALPRQESQRPFFWIFMDNLLLTEDDQETTTRFLQTEAVTLQDVRGRDYQNAMRVWSNIPGLKSKHAPLTPKEEEYLQAQVRSRSKLDAPKVDLLVKNCLLPLREYFKYFSQNSLPLGGPSSGAPPPSGGSPAGSPTSTEEGTSESATPESGPGTSTEPSEGSAPGSPAGSPTSTEEGTSTEPSEGSAPGTSTEPSEGMAPKKKRKVGRVPAAMAERPFQCRICMRNFSRSDVLSTHIRTHTGEKPFACDICGKKFADNSSRTRHTKIHTGSQKPFQCRICMRNFSRPYTLRLHIRTHTGEKPFACDICGRKFADSSHRTRHTKIHTGSQKPFQCRICMRNFSRSDHLSQHIRTHTGEKPFACDICGRKFADSSHRTRHTKIHLRQKDAARGSGPKKKRKVNGGGGSRTLVTFKDVFVDFTREEWKLLDTAQQIVYRNVMLENYKNLVSLGYQLTKPDVILRLEKGEEPWLV

SEQ ID NO: 1002 - protein, 898 aa, Synthetic construct
  REGION 1..898: note = 3xFLAG-DNMT3AL-XTEN80-SV40 NLS-ZFP-SV40 NLS-KRAB (AA sequence)
MHDQEFDPPKVYPPVPAEKRKPIRVLSLFDGIATGLLVLKDLGIQVDRYIASEVCEDSITVGMVRHQGKIMYVGDVRSVTQKHIQEWGPFDLVIGGSPCNDLSIVNPARKGLYEGTGRLFFEFYRLLHDARPKEGDDRPFFWLFENVVAMGVSDKRDISRFLESNPVMIDAKEVSAAHRARYFWGNLPGMNRPLASTVNDKLELQECLEHGRIAKFSKVRTITTRSNSIKQGKDQHFPVFMNEKEDILWCTEMERVFGFPVHYTDVSNMSRLARQRLLGRSWSVPVIRHLFAPLKEYFACVSSGNSNANSRGPSFSSGLVPLSLRGSHMGPMEIYKTVSAWKRQPVRVLSLFRNIDKVLKSLGFLESGSGSGGGTLKYVEDVTNVVRRDVEKWGPFDLVYGSTQPLGSSCDRCPGWYMFQFHRILQYALPRQESQRPFFWIFMDNLLLTEDDQETTTRFLQTEAVTLQDVRGRDYQNAMRVWSNIPGLKSKHAPLTPKEEEYLQAQVRSRSKLDAPKVDLLVKNCLLPLREYFKYFSQNSLPLGGPSSGAPPPSGGSPAGSPTSTEEGTSESATPESGPGTSTEPSEGSAPGSPAGSPTSTEEGTSTEPSEGSAPGTSTEPSEGMAPKKKRKVGRVPAAMAERPFQCRICMRNFSRSDHLSQHIRTHTGEKPFACDICGRKFAQSADRTKHTKIHTGSQKPFQCRICMRNFSRSDHLSQHIRTHTGEKPFACDICGRKFARRSDLKRHTKIHTGSQKPFQCRICMRNFSRSDHLSRHIRTHTGEKPFACDICGRKFAQSSDLRRHTKIHLRQKDAARGSGPKKKRKVNGGGGSRTLVTFKDVFVDFTREEWKLLDTAQQIVYRNVMLENYKNLVSLGYQLTKPDVILRLEKGEEPWLV

SEQ ID NO: 1003 - protein, 898 aa, Synthetic construct
  REGION 1..898: note = 3xFLAG-DNMT3AL-XTEN80-SV40 NLS-ZFP-SV40 NLS-KRAB (AA sequence)
MHDQEFDPPKVYPPVPAEKRKPIRVLSLFDGIATGLLVLKDLGIQVDRYIASEVCEDSITVGMVRHQGKIMYVGDVRSVTQKHIQEWGPFDLVIGGSPCNDLSIVNPARKGLYEGTGRLFFEFYRLLHDARPKEGDDRPFFWLFENVVAMGVSDKRDISRFLESNPVMIDAKEVSAAHRARYFWGNLPGMNRPLASTVNDKLELQECLEHGRIAKFSKVRTITTRSNSIKQGKDQHFPVFMNEKEDILWCTEMERVFGFPVHYTDVSNMSRLARQRLLGRSWSVPVIRHLFAPLKEYFACVSSGNSNANSRGPSFSSGLVPLSLRGSHMGPMEIYKTVSAWKRQPVRVLSLFRNIDKVLKSLGFLESGSGSGGGTLKYVEDVTNVVRRDVEKWGPFDLVYGSTQPLGSSCDRCPGWYMFQFHRILQYALPRQESQRPFFWIFMDNLLLTEDDQETTTRFLQTEAVTLQDVRGRDYQNAMRVWSNIPGLKSKHAPLTPKEEEYLQAQVRSRSKLDAPKVDLLVKNCLLPLREYFKYFSQNSLPLGGPSSGAPPPSGGSPAGSPTSTEEGTSESATPESGPGTSTEPSEGSAPGSPAGSPTSTEEGTSTEPSEGSAPGTSTEPSEGMAPKKKRKVGRVPAAMAERPFQCRICMRNFSRSDNLSEHIRTHTGEKPFACDICGRKFATSSNRKTHTKIHTGSQKPFQCRICMRNFSDRSHLTRHIRTHTGEKPFACDICGRKFARSDALTQHTKIHTGSQKPFQCRICMRNFSDRSALARHIRTHTGEKPFACDICGRKFARRFTLSKHTKIHLRQKDAARGSGPKKKRKVNGGGGSRTLVTFKDVFVDFTREEWKLLDTAQQIVYRNVMLENYKNLVSLGYQLTKPDVILRLEKGEEPWLV

SEQ ID NO: 1004 - protein, 898 aa, Synthetic construct
  REGION 1..898: note = 3xFLAG-DNMT3AL-XTEN80-SV40 NLS-ZFP-SV40 NLS-KRAB (AA sequence)
MHDQEFDPPKVYPPVPAEKRKPIRVLSLFDGIATGLLVLKDLGIQVDRYIASEVCEDSITVGMVRHQGKIMYVGDVRSVTQKHIQEWGPFDLVIGGSPCNDLSIVNPARKGLYEGTGRLFFEFYRLLHDARPKEGDDRPFFWLFENVVAMGVSDKRDISRFLESNPVMIDAKEVSAAHRARYFWGNLPGMNRPLASTVNDKLELQECLEHGRIAKFSKVRTITTRSNSIKQGKDQHFPVFMNEKEDILWCTEMERVFGFPVHYTDVSNMSRLARQRLLGRSWSVPVIRHLFAPLKEYFACVSSGNSNANSRGPSFSSGLVPLSLRGSHMGPMEIYKTVSAWKRQPVRVLSLFRNIDKVLKSLGFLESGSGSGGGTLKYVEDVTNVVRRDVEKWGPFDLVYGSTQPLGSSCDRCPGWYMFQFHRILQYALPRQESQRPFFWIFMDNLLLTEDDQETTTRFLQTEAVTLQDVRGRDYQNAMRVWSNIPGLKSKHAPLTPKEEEYLQAQVRSRSKLDAPKVDLLVKNCLLPLREYFKYFSQNSLPLGGPSSGAPPPSGGSPAGSPTSTEEGTSESATPESGPGTSTEPSEGSAPGSPAGSPTSTEEGTSTEPSEGSAPGTSTEPSEGMAPKKKRKVGRVPAAMAERPFQCRICMRNFSRSDHLSEHIRTHTGEKPFACDICGRKFAQYSGRYYHTKIHTGSQKPFQCRICMRNFSHGQTLNEHIRTHTGEKPFACDICGRKFAQSGNLARHTKIHTGSQKPFQCRICMRNFSRSDSLLRHIRTHTGEKPFACDICGRKFACREYRGKHTKIHLRQKDAARGSGPKKKRKVNGGGGSRTLVTFKDVFVDFTREEWKLLDTAQQIVYRNVMLENYKNLVSLGYQLTKPDVILRLEKGEEPWLV

SEQ ID NO: 1005 - protein, 898 aa, Synthetic construct
  REGION 1..898: note = 3xFLAG-DNMT3AL-XTEN80-SV40 NLS-ZFP-SV40 NLS-KRAB (AA sequence)
MHDQEFDPPKVYPPVPAEKRKPIRVLSLFDGIATGLLVLKDLGIQVDRYIASEVCEDSITVGMVRHQGKIMYVGDVRSVTQKHIQEWGPFDLVIGGSPCNDLSIVNPARKGLYEGTGRLFFEFYRLLHDARPKEGDDRPFFWLFENVVAMGVSDKRDISRFLESNPVMIDAKEVSAAHRARYFWGNLPGMNRPLASTVNDKLELQECLEHGRIAKFSKVRTITTRSNSIKQGKDQHFPVFMNEKEDILWCTEMERVFGFPVHYTDVSNMSRLARQRLLGRSWSVPVIRHLFAPLKEYFACVSSGNSNANSRGPSFSSGLVPLSLRGSHMGPMEIYKTVSAWKRQPVRVLSLFRNIDKVLKSLGFLESGSGSGGGTLKYVEDVTNVVRRDVEKWGPFDLVYGSTQPLGSSCDRCPGWYMFQFHRILQYALPRQESQRPFFWIFMDNLLLTEDDQETTTRFLQTEAVTLQDVRGRDYQNAMRVWSNIPGLKSKHAPLTPKEEEYLQAQVRSRSKLDAPKVDLLVKNCLLPLREYFKYFSQNSLPLGGPSSGAPPPSGGSPAGSPTSTEEGTSESATPESGPGTSTEPSEGSAPGSPAGSPTSTEEGTSTEPSEGSAPGTSTEPSEGMAPKKKRKVGRVPAAMAERPFQCRICMRNFSQSANRTTHIRTHTGEKPFACDICGRKFARSANLTRHTKIHTGSQKPFQCRICMRNFSRSDVLSEHIRTHTGEKPFACDICGRKFATSGHLSRHTKIHTGSQKPFQCRICMRNFSQSSDLSRHIRTHTGEKPFACDICGRKFAQWSTRKRHTKIHLRQKDAARGSGPKKKRKVNGGGGSRTLVTFKDVFVDFTREEWKLLDTAQQIVYRNVMLENYKNLVSLGYQLTKPDVILRLEKGEEPWLV

SEQ ID NO: 1006 - protein, 898 aa, Synthetic construct
  REGION 1..898: note = 3xFLAG-DNMT3AL-XTEN80-SV40 NLS-ZFP-SV40 NLS-KRAB (AA sequence)
MHDQEFDPPKVYPPVPAEKRKPIRVLSLFDGIATGLLVLKDLGIQVDRYIASEVCEDSITVGMVRHQGKIMYVGDVRSVTQKHIQEWGPFDLVIGGSPCNDLSIVNPARKGLYEGTGRLFFEFYRLLHDARPKEGDDRPFFWLFENVVAMGVSDKRDISRFLESNPVMIDAKEVSAAHRARYFWGNLPGMNRPLASTVNDKLELQECLEHGRIAKFSKVRTITTRSNSIKQGKDQHFPVFMNEKEDILWCTEMERVFGFPVHYTDVSNMSRLARQRLLGRSWSVPVIRHLFAPLKEYFACVSSGNSNANSRGPSFSSGLVPLSLRGSHMGPMEIYKTVSAWKRQPVRVLSLFRNIDKVLKSLGFLESGSGSGGGTLKYVEDVTNVVRRDVEKWGPFDLVYGSTQPLGSSCDRCPGWYMFQFHRILQYALPRQESQRPFFWIFMDNLLLTEDDQETTTRFLQTEAVTLQDVRGRDYQNAMRVWSNIPGLKSKHAPLTPKEEEYLQAQVRSRSKLDAPKVDLLVKNCLLPLREYFKYFSQNSLPLGGPSSGAPPPSGGSPAGSPTSTEEGTSESATPESGPGTSTEPSEGSAPGSPAGSPTSTEEGTSTEPSEGSAPGTSTEPSEGMAPKKKRKVGRVPAAMAERPFQCRICMRNFSQSGNLARHIRTHTGEKPFACDICGRKFAATCCLAHHTKIHTGSQKPFQCRICMRNFSRWQYLPTHIRTHAGEKPFACDICGRKFADRSALARHTKIHTGSQKPFQCRICMRNFSRSDNLSEHIRTHTGEKPFACDICGRKFAKRCNLRCHTKIHLRQKDAARGSGPKKKRKVNGGGGSRTLVTFKDVFVDFTREEWKLLDTAQQIVYRNVMLENYKNLVSLGYQLTKPDVILRLEKGEEPWLV

SEQ ID NO: 1007 - protein, 898 aa, Synthetic construct
  REGION 1..898: note = 3xFLAG-DNMT3AL-XTEN80-SV40 NLS-ZFP-SV40 NLS-KRAB (AA sequence)
MHDQEFDPPKVYPPVPAEKRKPIRVLSLFDGIATGLLVLKDLGIQVDRYIASEVCEDSITVGMVRHQGKIMYVGDVRSVTQKHIQEWGPFDLVIGGSPCNDLSIVNPARKGLYEGTGRLFFEFYRLLHDARPKEGDDRPFFWLFENVVAMGVSDKRDISRFLESNPVMIDAKEVSAAHRARYFWGNLPGMNRPLASTVNDKLELQECLEHGRIAKFSKVRTITTRSNSIKQGKDQHFPVFMNEKEDILWCTEMERVFGFPVHYTDVSNMSRLARQRLLGRSWSVPVIRHLFAPLKEYFACVSSGNSNANSRGPSFSSGLVPLSLRGSHMGPMEIYKTVSAWKRQPVRVLSLFRNIDKVLKSLGFLESGSGSGGGTLKYVEDVTNVVRRDVEKWGPFDLVYGSTQPLGSSCDRCPGWYMFQFHRILQYALPRQESQRPFFWIFMDNLLLTEDDQETTTRFLQTEAVTLQDVRGRDYQNAMRVWSNIPGLKSKHAPLTPKEEEYLQAQVRSRSKLDAPKVDLLVKNCLLPLREYFKYFSQNSLPLGGPSSGAPPPSGGSPAGSPTSTEEGTSESATPESGPGTSTEPSEGSAPGSPAGSPTSTEEGTSTEPSEGSAPGTSTEPSEGMAPKKKRKVGRVPAAMAERPFQCRICMRNFSNPANLTRHIRTHTGEKPFACDICGRKFAQNATRTKHTKIHTGSQKPFQCRICMRNFSQSGHLARHIRTHTGEKPFACDICGRKFANRHDRAKHTKIHTGSQKPFQCRICMRNFSRSDHLSEHIRTHTGEKPFACDICGRKFAQRRSRYKHTKIHLRQKDAARGSGPKKKRKVNGGGGSRTLVTFKDVFVDFTREEWKLLDTAQQIVYRNVMLENYKNLVSLGYQLTKPDVILRLEKGEEPWLV

SEQ ID NO: 1008 - protein, 898 aa, Synthetic construct
  REGION 1..898: note = 3xFLAG-DNMT3AL-XTEN80-SV40 NLS-ZFP-SV40 NLS-KRAB (AA sequence)
MHDQEFDPPKVYPPVPAEKRKPIRVLSLFDGIATGLLVLKDLGIQVDRYIASEVCEDSITVGMVRHQGKIMYVGDVRSVTQKHIQEWGPFDLVIGGSPCNDLSIVNPARKGLYEGTGRLFFEFYRLLHDARPKEGDDRPFFWLFENVVAMGVSDKRDISRFLESNPVMIDAKEVSAAHRARYFWGNLPGMNRPLASTVNDKLELQECLEHGRIAKFSKVRTITTRSNSIKQGKDQHFPVFMNEKEDILWCTEMERVFGFPVHYTDVSNMSRLARQRLLGRSWSVPVIRHLFAPLKEYFACVSSGNSNANSRGPSFSSGLVPLSLRGSHMGPMEIYKTVSAWKRQPVRVLSLFRNIDKVLKSLGFLESGSGSGGGTLKYVEDVTNVVRRDVEKWGPFDLVYGSTQPLGSSCDRCPGWYMFQFHRILQYALPRQESQRPFFWIFMDNLLLTEDDQETTTRFLQTEAVTLQDVRGRDYQNAMRVWSNIPGLKSKHAPLTPKEEEYLQAQVRSRSKLDAPKVDLLVKNCLLPLREYFKYFSQNSLPLGGPSSGAPPPSGGSPAGSPTSTEEGTSESATPESGPGTSTEPSEGSAPGSPAGSPTSTEEGTSTEPSEGSAPGTSTEPSEGMAPKKKRKVGRVPAAMAERPFQCRICMRNFSQSSDLSRHIRTHTGEKPFACDICGRKFAHRSTRNRHTKIHTGSQKPFQCRICMRNFSRSDVLSAHIRTHTGEKPFACDICGRKFADSRTRKNHTKIHTGSQKPFQCRICMRNFSQSGSLTRHIRTHTGEKPFACDICGRKFADQSGLAHHTKIHLRQKDAARGSGPKKKRKVNGGGGSRTLVTFKDVFVDFTREEWKLLDTAQQIVYRNVMLENYKNLVSLGYQLTKPDVILRLEKGEEPWLV

SEQ ID NO: 1009 - protein, 898 aa, Synthetic construct
  REGION 1..898: note = 3xFLAG-DNMT3AL-XTEN80-SV40 NLS-ZFP-SV40 NLS-KRAB (AA sequence)
MHDQEFDPPKVYPPVPAEKRKPIRVLSLFDGIATGLLVLKDLGIQVDRYIASEVCEDSITVGMVRHQGKIMYVGDVRSVTQKHIQEWGPFDLVIGGSPCNDLSIVNPARKGLYEGTGRLFFEFYRLLHDARPKEGDDRPFFWLFENVVAMGVSDKRDISRFLESNPVMIDAKEVSAAHRARYFWGNLPGMNRPLASTVNDKLELQECLEHGRIAKFSKVRTITTRSNSIKQGKDQHFPVFMNEKEDILWCTEMERVFGFPVHYTDVSNMSRLARQRLLGRSWSVPVIRHLFAPLKEYFACVSSGNSNANSRGPSFSSGLVPLSLRGSHMGPMEIYKTVSAWKRQPVRVLSLFRNIDKVLKSLGFLESGSGSGGGTLKYVEDVTNVVRRDVEKWGPFDLVYGSTQPLGSSCDRCPGWYMFQFHRILQYALPRQESQRPFFWIFMDNLLLTEDDQETTTRFLQTEAVTLQDVRGRDYQNAMRVWSNIPGLKSKHAPLTPKEEEYLQAQVRSRSKLDAPKVDLLVKNCLLPLREYFKYFSQNSLPLGGPSSGAPPPSGGSPAGSPTSTEEGTSESATPESGPGTSTEPSEGSAPGSPAGSPTSTEEGTSTEPSEGSAPGTSTEPSEGMAPKKKRKVGRVPAAMAERPFQCRICMRNFSQNPAQWRHIRTHTGEKPFACDICGRKFARSADLSRHTKIHTGSQKPFQCRICMRNFSTSGSLSRHIRTHTGEKPFACDICGRKFARSDHLSRHTKIHTGSQKPFQCRICMRNFSRSDSLLRHIRTHTGEKPFACDICGRKFAQSYDRFQHTKIHLRQKDAARGSGPKKKRKVNGGGGSRTLVTFKDVFVDFTREEWKLLDTAQQIVYRNVMLENYKNLVSLGYQLTKPDVILRLEKGEEPWLV

SEQ ID NO: 1010 - protein, 898 aa, Synthetic construct
  REGION 1..898: note = 3xFLAG-DNMT3AL-XTEN80-SV40 NLS-ZFP-SV40 NLS-KRAB (AA sequence)
MHDQEFDPPKVYPPVPAEKRKPIRVLSLFDGIATGLLVLKDLGIQVDRYIASEVCEDSITVGMVRHQGKIMYVGDVRSVTQKHIQEWGPFDLVIGGSPCNDLSIVNPARKGLYEGTGRLFFEFYRLLHDARPKEGDDRPFFWLFENVVAMGVSDKRDISRFLESNPVMIDAKEVSAAHRARYFWGNLPGMNRPLASTVNDKLELQECLEHGRIAKFSKVRTITTRSNSIKQGKDQHFPVFMNEKEDILWCTEMERVFGFPVHYTDVSNMSRLARQRLLGRSWSVPVIRHLFAPLKEYFACVSSGNSNANSRGPSFSSGLVPLSLRGSHMGPMEIYKTVSAWKRQPVRVLSLFRNIDKVLKSLGFLESGSGSGGGTLKYVEDVTNVVRRDVEKWGPFDLVYGSTQPLGSSCDRCPGWYMFQFHRILQYALPRQESQRPFFWIFMDNLLLTEDDQETTTRFLQTEAVTLQDVRGRDYQNAMRVWSNIPGLKSKHAPLTPKEEEYLQAQVRSRSKLDAPKVDLLVKNCLLPLREYFKYFSQNSLPLGGPSSGAPPPSGGSPAGSPTSTEEGTSESATPESGPGTSTEPSEGSAPGSPAGSPTSTEEGTSTEPSEGSAPGTSTEPSEGMAPKKKRKVGRVPAAMAERPFQCRICMRNFSTSGSLSRHIRTHTGEKPFACDICGRKFARSDHLSRHTKIHTGSQKPFQCRICMRNFSRSDSLLRHIRTHTGEKPFACDICGRKFAQSYDRFQHTKIHTGSQKPFQCRICMRNFSRSDNLSTHIRTHTGEKPFACDICGRKFADNRDRIKHTKIHLRQKDAARGSGPKKKRKVNGGGGSRTLVTFKDVFVDFTREEWKLLDTAQQIVYRNVMLENYKNLVSLGYQLTKPDVILRLEKGEEPWLV

SEQ ID NO: 1011 - protein, 898 aa, Synthetic construct
  REGION 1..898: note = 3xFLAG-DNMT3AL-XTEN80-SV40 NLS-ZFP-SV40 NLS-KRAB (AA sequence)
MHDQEFDPPKVYPPVPAEKRKPIRVLSLFDGIATGLLVLKDLGIQVDRYIASEVCEDSITVGMVRHQGKIMYVGDVRSVTQKHIQEWGPFDLVIGGSPCNDLSIVNPARKGLYEGTGRLFFEFYRLLHDARPKEGDDRPFFWLFENVVAMGVSDKRDISRFLESNPVMIDAKEVSAAHRARYFWGNLPGMNRPLASTVNDKLELQECLEHGRIAKFSKVRTITTRSNSIKQGKDQHFPVFMNEKEDILWCTEMERVFGFPVHYTDVSNMSRLARQRLLGRSWSVPVIRHLFAPLKEYFACVSSGNSNANSRGPSFSSGLVPLSLRGSHMGPMEIYKTVSAWKRQPVRVLSLFRNIDKVLKSLGFLESGSGSGGGTLKYVEDVTNVVRRDVEKWGPFDLVYGSTQPLGSSCDRCPGWYMFQFHRILQYALPRQESQRPFFWIFMDNLLLTEDDQETTTRFLQTEAVTLQDVRGRDYQNAMRVWSNIPGLKSKHAPLTPKEEEYLQAQVRSRSKLDAPKVDLLVKNCLLPLREYFKYFSQNSLPLGGPSSGAPPPSGGSPAGSPTSTEEGTSESATPESGPGTSTEPSEGSAPGSPAGSPTSTEEGTSTEPSEGSAPGTSTEPSEGMAPKKKRKVGRVPAAMAERPFQCRICMRNFSDRSNLSRHIRTHTGEKPFACDICGRKFALRQNLIMHTKIHTGSQKPFQCRICMRNFSERGTLARHIRTHTGEKPFACDICGRKFARSDALTQHTKIHTGSQKPFQCRICMRNFSRSDSLSQHIRTHTGEKPFACDICGRKFARKADRTRHTKIHLRQKDAARGSGPKKKRKVNGGGGSRTLVTFKDVFVDFTREEWKLLDTAQQIVYRNVMLENYKNLVSLGYQLTKPDVILRLEKGEEPWLV

SEQ ID NO: 1012 - protein, 898 aa, Synthetic construct
  REGION 1..898: note = 3xFLAG-DNMT3AL-XTEN80-SV40 NLS-ZFP-SV40 NLS-KRAB (AA sequence)
MHDQEFDPPKVYPPVPAEKRKPIRVLSLFDGIATGLLVLKDLGIQVDRYIASEVCEDSITVGMVRHQGKIMYVGDVRSVTQKHIQEWGPFDLVIGGSPCNDLSIVNPARKGLYEGTGRLFFEFYRLLHDARPKEGDDRPFFWLFENVVAMGVSDKRDISRFLESNPVMIDAKEVSAAHRARYFWGNLPGMNRPLASTVNDKLELQECLEHGRIAKFSKVRTITTRSNSIKQGKDQHFPVFMNEKEDILWCTEMERVFGFPVHYTDVSNMSRLARQRLLGRSWSVPVIRHLFAPLKEYFACVSSGNSNANSRGPSFSSGLVPLSLRGSHMGPMEIYKTVSAWKRQPVRVLSLFRNIDKVLKSLGFLESGSGSGGGTLKYVEDVTNVVRRDVEKWGPFDLVYGSTQPLGSSCDRCPGWYMFQFHRILQYALPRQESQRPFFWIFMDNLLLTEDDQETTTRFLQTEAVTLQDVRGRDYQNAMRVWSNIPGLKSKHAPLTPKEEEYLQAQVRSRSKLDAPKVDLLVKNCLLPLREYFKYFSQNSLPLGGPSSGAPPPSGGSPAGSPTSTEEGTSESATPESGPGTSTEPSEGSAPGSPAGSPTSTEEGTSTEPSEGSAPGTSTEPSEGMAPKKKRKVGRVPAAMAERPFQCRICMRNFSQYCCLTNHIRTHTGEKPFACDICGRKFATSGNLTRHTKIHTGSQKPFQCRICMRNFSQSSDLSRHIRTHTGEKPFACDICGRKFAFRYYLKRHTKIHTGSQKPFQCRICMRNFSQSGDLTRHIRTHTGEKPFACDICGRKFADKGNLTKHTKIHLRQKDAARGSGPKKKRKVNGGGGSRTLVTFKDVFVDFTREEWKLLDTAQQIVYRNVMLENYKNLVSLGYQLTKPDVILRLEKGEEPWLV

SEQ ID NO: 1013 - protein, 898 aa, Synthetic construct
  REGION 1..898: note = 3xFLAG-DNMT3AL-XTEN80-SV40 NLS-ZFP-SV40 NLS-KRAB (AA sequence)
MHDQEFDPPKVYPPVPAEKRKPIRVLSLFDGIATGLLVLKDLGIQVDRYIASEVCEDSITVGMVRHQGKIMYVGDVRSVTQKHIQEWGPFDLVIGGSPCNDLSIVNPARKGLYEGTGRLFFEFYRLLHDARPKEGDDRPFFWLFENVVAMGVSDKRDISRFLESNPVMIDAKEVSAAHRARYFWGNLPGMNRPLASTVNDKLELQECLEHGRIAKFSKVRTITTRSNSIKQGKDQHFPVFMNEKEDILWCTEMERVFGFPVHYTDVSNMSRLARQRLLGRSWSVPVIRHLFAPLKEYFACVSSGNSNANSRGPSFSSGLVPLSLRGSHMGPMEIYKTVSAWKRQPVRVLSLFRNIDKVLKSLGFLESGSGSGGGTLKYVEDVTNVVRRDVEKWGPFDLVYGSTQPLGSSCDRCPGWYMFQFHRILQYALPRQESQRPFFWIFMDNLLLTEDDQETTTRFLQTEAVTLQDVRGRDYQNAMRVWSNIPGLKSKHAPLTPKEEEYLQAQVRSRSKLDAPKVDLLVKNCLLPLREYFKYFSQNSLPLGGPSSGAPPPSGGSPAGSPTSTEEGTSESATPESGPGTSTEPSEGSAPGSPAGSPTSTEEGTSTEPSEGSAPGTSTEPSEGMAPKKKRKVGRVPAAMAERPFQCRICMRNFSTSGSLSRHIRTHTGEKPFACDICGRKFARSDNLTTHTKIHTGSQKPFQCRICMRNFSQSGNLARHIRTHTGEKPFACDICGRKFADRTTLMRHTKIHTGSQKPFQCRICMRNFSQSGHLARHIRTHTGEKPFACDICGRKFAQLTHLNSHTKIHLRQKDAARGSGPKKKRKVNGGGGSRTLVTFKDVFVDFTREEWKLLDTAQQIVYRNVMLENYKNLVSLGYQLTKPDVILRLEKGEEPWLV

SEQ ID NO: 1014 - protein, 898 aa, Synthetic construct
  REGION 1..898: note = 3xFLAG-DNMT3AL-XTEN80-SV40 NLS-ZFP-SV40 NLS-KRAB (AA sequence)
MHDQEFDPPKVYPPVPAEKRKPIRVLSLFDGIATGLLVLKDLGIQVDRYIASEVCEDSITVGMVRHQGKIMYVGDVRSVTQKHIQEWGPFDLVIGGSPCNDLSIVNPARKGLYEGTGRLFFEFYRLLHDARPKEGDDRPFFWLFENVVAMGVSDKRDISRFLESNPVMIDAKEVSAAHRARYFWGNLPGMNRPLASTVNDKLELQECLEHGRIAKFSKVRTITTRSNSIKQGKDQHFPVFMNEKEDILWCTEMERVFGFPVHYTDVSNMSRLARQRLLGRSWSVPVIRHLFAPLKEYFACVSSGNSNANSRGPSFSSGLVPLSLRGSHMGPMEIYKTVSAWKRQPVRVLSLFRNIDKVLKSLGFLESGSGSGGGTLKYVEDVTNVVRRDVEKWGPFDLVYGSTQPLGSSCDRCPGWYMFQFHRILQYALPRQESQRPFFWIFMDNLLLTEDDQETTTRFLQTEAVTLQDVRGRDYQNAMRVWSNIPGLKSKHAPLTPKEEEYLQAQVRSRSKLDAPKVDLLVKNCLLPLREYFKYFSQNSLPLGGPSSGAPPPSGGSPAGSPTSTEEGTSESATPESGPGTSTEPSEGSAPGSPAGSPTSTEEGTSTEPSEGSAPGTSTEPSEGMAPKKKRKVGRVPAAMAERPFQCRICMRNFSIKHDLHRHIRTHTGEKPFACDICGRKFARSANLTRHTKIHTGSQKPFQCRICMRNFSRSDNLARHIRTHTGEKPFACDICGRKFAQNVSRPRHTKIHTGSQKPFQCRICMRNFSRSDDLSKHIRTHTGEKPFACDICGRKFADSSHRTRHTKIHLRQKDAARGSGPKKKRKVNGGGGSRTLVTFKDVFVDFTREEWKLLDTAQQIVYRNVMLENYKNLVSLGYQLTKPDVILRLEKGEEPWLV

SEQ ID NO: 1015 - protein, 898 aa, Synthetic construct
  REGION 1..898: note = 3xFLAG-DNMT3AL-XTEN80-SV40 NLS-ZFP-SV40 NLS-KRAB (AA sequence)
MHDQEFDPPKVYPPVPAEKRKPIRVLSLFDGIATGLLVLKDLGIQVDRYIASEVCEDSITVGMVRHQGKIMYVGDVRSVTQKHIQEWGPFDLVIGGSPCNDLSIVNPARKGLYEGTGRLFFEFYRLLHDARPKEGDDRPFFWLFENVVAMGVSDKRDISRFLESNPVMIDAKEVSAAHRARYFWGNLPGMNRPLASTVNDKLELQECLEHGRIAKFSKVRTITTRSNSIKQGKDQHFPVFMNEKEDILWCTEMERVFGFPVHYTDVSNMSRLARQRLLGRSWSVPVIRHLFAPLKEYFACVSSGNSNANSRGPSFSSGLVPLSLRGSHMGPMEIYKTVSAWKRQPVRVLSLFRNIDKVLKSLGFLESGSGSGGGTLKYVEDVTNVVRRDVEKWGPFDLVYGSTQPLGSSCDRCPGWYMFQFHRILQYALPRQESQRPFFWIFMDNLLLTEDDQETTTRFLQTEAVTLQDVRGRDYQNAMRVWSNIPGLKSKHAPLTPKEEEYLQAQVRSRSKLDAPKVDLLVKNCLLPLREYFKYFSQNSLPLGGPSSGAPPPSGGSPAGSPTSTEEGTSESATPESGPGTSTEPSEGSAPGSPAGSPTSTEEGTSTEPSEGSAPGTSTEPSEGMAPKKKRKVGRVPAAMAERPFQCRICMRNFSRSDNLARHIRTHTGEKPFACDICGRKFAQNVSRPRHTKIHTGSQKPFQCRICMRNFSRSDDLSKHIRTHTGEKPFACDICGRKFADSSHRTRHTKIHTGSQKPFQCRICMRNFSTSSNRKTHIRTHTGEKPFACDICGRKFAAQWTRACHTKIHLRQKDAARGSGPKKKRKVNGGGGSRTLVTFKDVFVDFTREEWKLLDTAQQIVYRNVMLENYKNLVSLGYQLTKPDVILRLEKGEEPWLV

SEQ ID NO: 1016 - protein, 898 aa, Synthetic construct
  REGION 1..898: note = 3xFLAG-DNMT3AL-XTEN80-SV40 NLS-ZFP-SV40 NLS-KRAB (AA sequence)
MHDQEFDPPKVYPPVPAEKRKPIRVLSLFDGIATGLLVLKDLGIQVDRYIASEVCEDSITVGMVRHQGKIMYVGDVRSVTQKHIQEWGPFDLVIGGSPCNDLSIVNPARKGLYEGTGRLFFEFYRLLHDARPKEGDDRPFFWLFENVVAMGVSDKRDISRFLESNPVMIDAKEVSAAHRARYFWGNLPGMNRPLASTVNDKLELQECLEHGRIAKFSKVRTITTRSNSIKQGKDQHFPVFMNEKEDILWCTEMERVFGFPVHYTDVSNMSRLARQRLLGRSWSVPVIRHLFAPLKEYFACVSSGNSNANSRGPSFSSGLVPLSLRGSHMGPMEIYKTVSAWKRQPVRVLSLFRNIDKVLKSLGFLESGSGSGGGTLKYVEDVTNVVRRDVEKWGPFDLVYGSTQPLGSSCDRCPGWYMFQFHRILQYALPRQESQRPFFWIFMDNLLLTEDDQETTTRFLQTEAVTLQDVRGRDYQNAMRVWSNIPGLKSKHAPLTPKEEEYLQAQVRSRSKLDAPKVDLLVKNCLLPLREYFKYFSQNSLPLGGPSSGAPPPSGGSPAGSPTSTEEGTSESATPESGPGTSTEPSEGSAPGSPAGSPTSTEEGTSTEPSEGSAPGTSTEPSEGMAPKKKRKVGRVPAAMAERPFQCRICMRNFSRSDDLSKHIRTHTGEKPFACDICGRKFADSSHRTRHTKIHTGSQKPFQCRICMRNFSTSSNRKTHIRTHTGEKPFACDICGRKFAAQWTRACHTKIHTGSQKPFQCRICMRNFSRKQTRTTHIRTHTGEKPFACDICGRKFAHRSSLRRHTKIHLRQKDAARGSGPKKKRKVNGGGGSRTLVTFKDVFVDFTREEWKLLDTAQQIVYRNVMLENYKNLVSLGYQLTKPDVILRLEKGEEPWLV

SEQ ID NO: 1017 - protein, 898 aa, Synthetic construct
  REGION 1..898: note = 3xFLAG-DNMT3AL-XTEN80-SV40 NLS-ZFP-SV40 NLS-KRAB (AA sequence)
MHDQEFDPPKVYPPVPAEKRKPIRVLSLFDGIATGLLVLKDLGIQVDRYIASEVCEDSITVGMVRHQGKIMYVGDVRSVTQKHIQEWGPFDLVIGGSPCNDLSIVNPARKGLYEGTGRLFFEFYRLLHDARPKEGDDRPFFWLFENVVAMGVSDKRDISRFLESNPVMIDAKEVSAAHRARYFWGNLPGMNRPLASTVNDKLELQECLEHGRIAKFSKVRTITTRSNSIKQGKDQHFPVFMNEKEDILWCTEMERVFGFPVHYTDVSNMSRLARQRLLGRSWSVPVIRHLFAPLKEYFACVSSGNSNANSRGPSFSSGLVPLSLRGSHMGPMEIYKTVSAWKRQPVRVLSLFRNIDKVLKSLGFLESGSGSGGGTLKYVEDVTNVVRRDVEKWGPFDLVYGSTQPLGSSCDRCPGWYMFQFHRILQYALPRQESQRPFFWIFMDNLLLTEDDQETTTRFLQTEAVTLQDVRGRDYQNAMRVWSNIPGLKSKHAPLTPKEEEYLQAQVRSRSKLDAPKVDLLVKNCLLPLREYFKYFSQNSLPLGGPSSGAPPPSGGSPAGSPTSTEEGTSESATPESGPGTSTEPSEGSAPGSPAGSPTSTEEGTSTEPSEGSAPGTSTEPSEGMAPKKKRKVGRVPAAMAERPFQCRICMRNFSQSAHRKNHIRTHTGEKPFACDICGRKFATSSNRKTHTKIHTGSQKPFQCRICMRNFSRSDNLSAHIRTHTGEKPFACDICGRKFARNNDRKTHTKIHTGSQKPFQCRICMRNFSTSGSLSRHIRTHTGEKPFACDICGRKFAQAGHLAKHTKIHLRQKDAARGSGPKKKRKVNGGGGSRTLVTFKDVFVDFTREEWKLLDTAQQIVYRNVMLENYKNLVSLGYQLTKPDVILRLEKGEEPWLV

SEQ ID NO: 1018 - protein, 898 aa, Synthetic construct
  REGION 1..898: note = 3xFLAG-DNMT3AL-XTEN80-SV40 NLS-ZFP-SV40 NLS-KRAB (AA sequence)
MHDQEFDPPKVYPPVPAEKRKPIRVLSLFDGIATGLLVLKDLGIQVDRYIASEVCEDSITVGMVRHQGKIMYVGDVRSVTQKHIQEWGPFDLVIGGSPCNDLSIVNPARKGLYEGTGRLFFEFYRLLHDARPKEGDDRPFFWLFENVVAMGVSDKRDISRFLESNPVMIDAKEVSAAHRARYFWGNLPGMNRPLASTVNDKLELQECLEHGRIAKFSKVRTITTRSNSIKQGKDQHFPVFMNEKEDILWCTEMERVFGFPVHYTDVSNMSRLARQRLLGRSWSVPVIRHLFAPLKEYFACVSSGNSNANSRGPSFSSGLVPLSLRGSHMGPMEIYKTVSAWKRQPVRVLSLFRNIDKVLKSLGFLESGSGSGGGTLKYVEDVTNVVRRDVEKWGPFDLVYGSTQPLGSSCDRCPGWYMFQFHRILQYALPRQESQRPFFWIFMDNLLLTEDDQETTTRFLQTEAVTLQDVRGRDYQNAMRVWSNIPGLKSKHAPLTPKEEEYLQAQVRSRSKLDAPKVDLLVKNCLLPLREYFKYFSQNSLPLGGPSSGAPPPSGGSPAGSPTSTEEGTSESATPESGPGTSTEPSEGSAPGSPAGSPTSTEEGTSTEPSEGSAPGTSTEPSEGMAPKKKRKVGRVPAAMAERPFQCRICMRNFSRSDHLSQHIRTHTGEKPFACDICGRKFAASSTRTKHTKIHTGSQKPFQCRICMRNFSRSDDLTRHIRTHTGEKPFACDICGRKFAQKSNLSSHTKIHTGSQKPFQCRICMRNFSQSANRTTHIRTHTGEKPFACDICGRKFAQNATRTKHTKIHLRQKDAARGSGPKKKRKVNGGGGSRTLVTFKDVFVDFTREEWKLLDTAQQIVYRNVMLENYKNLVSLGYQLTKPDVILRLEKGEEPWLV

SEQ ID NO: 1019 - protein, 898 aa, Synthetic construct
  REGION 1..898: note = 3xFLAG-DNMT3AL-XTEN80-SV40 NLS-ZFP-SV40 NLS-KRAB (AA sequence)
MHDQEFDPPKVYPPVPAEKRKPIRVLSLFDGIATGLLVLKDLGIQVDRYIASEVCEDSITVGMVRHQGKIMYVGDVRSVTQKHIQEWGPFDLVIGGSPCNDLSIVNPARKGLYEGTGRLFFEFYRLLHDARPKEGDDRPFFWLFENVVAMGVSDKRDISRFLESNPVMIDAKEVSAAHRARYFWGNLPGMNRPLASTVNDKLELQECLEHGRIAKFSKVRTITTRSNSIKQGKDQHFPVFMNEKEDILWCTEMERVFGFPVHYTDVSNMSRLARQRLLGRSWSVPVIRHLFAPLKEYFACVSSGNSNANSRGPSFSSGLVPLSLRGSHMGPMEIYKTVSAWKRQPVRVLSLFRNIDKVLKSLGFLESGSGSGGGTLKYVEDVTNVVRRDVEKWGPFDLVYGSTQPLGSSCDRCPGWYMFQFHRILQYALPRQESQRPFFWIFMDNLLLTEDDQETTTRFLQTEAVTLQDVRGRDYQNAMRVWSNIPGLKSKHAPLTPKEEEYLQAQVRSRSKLDAPKVDLLVKNCLLPLREYFKYFSQNSLPLGGPSSGAPPPSGGSPAGSPTSTEEGTSESATPESGPGTSTEPSEGSAPGSPAGSPTSTEEGTSTEPSEGSAPGTSTEPSEGMAPKKKRKVGRVPAAMAERPFQCRICMRNFSRSDTLSEHIRTHTGEKPFACDICGRKFARRWTLVGHTKIHTGSQKPFQCRICMRNFSDRSNLSRHIRTHTGEKPFACDICGRKFAQSGDLTRHTKIHTGSQKPFQCRICMRNFSQSSDLSRHIRTHTGEKPFACDICGRKFAYHWYLKKHTKIHLRQKDAARGSGPKKKRKVNGGGGSRTLVTFKDVFVDFTREEWKLLDTAQQIVYRNVMLENYKNLVSLGYQLTKPDVILRLEKGEEPWLV

SEQ ID NO: 1020 - protein, 898 aa, Synthetic construct
  REGION 1..898: note = 3xFLAG-DNMT3AL-XTEN80-SV40 NLS-ZFP-SV40 NLS-KRAB (AA sequence)
MHDQEFDPPKVYPPVPAEKRKPIRVLSLFDGIATGLLVLKDLGIQVDRYIASEVCEDSITVGMVRHQGKIMYVGDVRSVTQKHIQEWGPFDLVIGGSPCNDLSIVNPARKGLYEGTGRLFFEFYRLLHDARPKEGDDRPFFWLFENVVAMGVSDKRDISRFLESNPVMIDAKEVSAAHRARYFWGNLPGMNRPLASTVNDKLELQECLEHGRIAKFSKVRTITTRSNSIKQGKDQHFPVFMNEKEDILWCTEMERVFGFPVHYTDVSNMSRLARQRLLGRSWSVPVIRHLFAPLKEYFACVSSGNSNANSRGPSFSSGLVPLSLRGSHMGPMEIYKTVSAWKRQPVRVLSLFRNIDKVLKSLGFLESGSGSGGGTLKYVEDVTNVVRRDVEKWGPFDLVYGSTQPLGSSCDRCPGWYMFQFHRILQYALPRQESQRPFFWIFMDNLLLTEDDQETTTRFLQTEAVTLQDVRGRDYQNAMRVWSNIPGLKSKHAPLTPKEEEYLQAQVRSRSKLDAPKVDLLVKNCLLPLREYFKYFSQNSLPLGGPSSGAPPPSGGSPAGSPTSTEEGTSESATPESGPGTSTEPSEGSAPGSPAGSPTSTEEGTSTEPSEGSAPGTSTEPSEGMAPKKKRKVGRVPAAMAERPFQCRICMRNFSRSANLARHIRTHTGEKPFACDICGRKFARSDNLREHTKIHTGSQKPFQCRICMRNFSRPYTLRLHIRTHTGEKPFACDICGRKFAHRSNLNKHTKIHTGSQKPFQCRICMRNFSQSGSLTRHIRTHTGEKPFACDICGRKFATSANLSRHTKIHLRQKDAARGSGPKKKRKVNGGGGSRTLVTFKDVFVDFTREEWKLLDTAQQIVYRNVMLENYKNLVSLGYQLTKPDVILRLEKGEEPWLV

SEQ ID NO: 1021 - protein, 894 aa, Synthetic construct
  REGION 1..894: note = 3xFLAG-DNMT3AL-XTEN80-SV40 NLS-ZFP-SV40 NLS-KRAB (AA sequence)
MHDQEFDPPKVYPPVPAEKRKPIRVLSLFDGIATGLLVLKDLGIQVDRYIASEVCEDSITVGMVRHQGKIMYVGDVRSVTQKHIQEWGPFDLVIGGSPCNDLSIVNPARKGLYEGTGRLFFEFYRLLHDARPKEGDDRPFFWLFENVVAMGVSDKRDISRFLESNPVMIDAKEVSAAHRARYFWGNLPGMNRPLASTVNDKLELQECLEHGRIAKFSKVRTITTRSNSIKQGKDQHFPVFMNEKEDILWCTEMERVFGFPVHYTDVSNMSRLARQRLLGRSWSVPVIRHLFAPLKEYFACVSSGNSNANSRGPSFSSGLVPLSLRGSHMGPMEIYKTVSAWKRQPVRVLSLFRNIDKVLKSLGFLESGSGSGGGTLKYVEDVTNVVRRDVEKWGPFDLVYGSTQPLGSSCDRCPGWYMFQFHRILQYALPRQESQRPFFWIFMDNLLLTEDDQETTTRFLQTEAVTLQDVRGRDYQNAMRVWSNIPGLKSKHAPLTPKEEEYLQAQVRSRSKLDAPKVDLLVKNCLLPLREYFKYFSQNSLPLGGPSSGAPPPSGGSPAGSPTSTEEGTSESATPESGPGTSTEPSEGSAPGSPAGSPTSTEEGTSTEPSEGSAPGTSTEPSEGMAPKKKRKVGRVPLEPGEKPYACPECGKSFSRSDDLVRHQRTHTGEKPYKCPECGKSFSTSGSLVRHQRTHTGEKPYKCPECGKSFSRSDKLVRHQRTHTGEKPYACPECGKSFSRSDELVRHQRTHTGEKPYKCPECGKSFSTSHSLTEHQRTHTGEKPYKCPECGKSFSRADNLTEHQRTHTGKKTSGSGPKKKRKVNGGGGSRTLVTFKDVFVDFTREEWKLLDTAQQIVYRNVMLENYKNLVSLGYQLTKPDVILRLEKGEEPWLV

SEQ ID NO: 1022 - protein, 894 aa, Synthetic construct
  REGION 1..894: note = 3xFLAG-DNMT3AL-XTEN80-SV40 NLS-ZFP-SV40 NLS-KRAB (AA sequence)
MHDQEFDPPKVYPPVPAEKRKPIRVLSLFDGIATGLLVLKDLGIQVDRYIASEVCEDSITVGMVRHQGKIMYVGDVRSVTQKHIQEWGPFDLVIGGSPCNDLSIVNPARKGLYEGTGRLFFEFYRLLHDARPKEGDDRPFFWLFENVVAMGVSDKRDISRFLESNPVMIDAKEVSAAHRARYFWGNLPGMNRPLASTVNDKLELQECLEHGRIAKFSKVRTITTRSNSIKQGKDQHFPVFMNEKEDILWCTEMERVFGFPVHYTDVSNMSRLARQRLLGRSWSVPVIRHLFAPLKEYFACVSSGNSNANSRGPSFSSGLVPLSLRGSHMGPMEIYKTVSAWKRQPVRVLSLFRNIDKVLKSLGFLESGSGSGGGTLKYVEDVTNVVRRDVEKWGPFDLVYGSTQPLGSSCDRCPGWYMFQFHRILQYALPRQESQRPFFWIFMDNLLLTEDDQETTTRFLQTEAVTLQDVRGRDYQNAMRVWSNIPGLKSKHAPLTPKEEEYLQAQVRSRSKLDAPKVDLLVKNCLLPLREYFKYFSQNSLPLGGPSSGAPPPSGGSPAGSPTSTEEGTSESATPESGPGTSTEPSEGSAPGSPAGSPTSTEEGTSTEPSEGSAPGTSTEPSEGMAPKKKRKVGRVPLEPGEKPYACPECGKSFSERSHLREHQRTHTGEKPYKCPECGKSFSTSHSLTEHQRTHTGEKPYKCPECGKSFSQAGHLASHQRTHTGEKPYACPECGKSFSTSHSLTEHQRTHTGEKPYKCPECGKSFSDPGHLVRHQRTHTGEKPYKCPECGKSFSTSGNLVRHQRTHTGKKTSGSGPKKKRKVNGGGGSRTLVTFKDVFVDFTREEWKLLDTAQQIVYRNVMLENYKNLVSLGYQLTKPDVILRLEKGEEPWLV

SEQ ID NO: 1023 - protein, 894 aa, Synthetic construct
  REGION 1..894: note = 3xFLAG-DNMT3AL-XTEN80-SV40 NLS-ZFP-SV40 NLS-KRAB (AA sequence)
MHDQEFDPPKVYPPVPAEKRKPIRVLSLFDGIATGLLVLKDLGIQVDRYIASEVCEDSITVGMVRHQGKIMYVGDVRSVTQKHIQEWGPFDLVIGGSPCNDLSIVNPARKGLYEGTGRLFFEFYRLLHDARPKEGDDRPFFWLFENVVAMGVSDKRDISRFLESNPVMIDAKEVSAAHRARYFWGNLPGMNRPLASTVNDKLELQECLEHGRIAKFSKVRTITTRSNSIKQGKDQHFPVFMNEKEDILWCTEMERVFGFPVHYTDVSNMSRLARQRLLGRSWSVPVIRHLFAPLKEYFACVSSGNSNANSRGPSFSSGLVPLSLRGSHMGPMEIYKTVSAWKRQPVRVLSLFRNIDKVLKSLGFLESGSGSGGGTLKYVEDVTNVVRRDVEKWGPFDLVYGSTQPLGSSCDRCPGWYMFQFHRILQYALPRQESQRPFFWIFMDNLLLTEDDQETTTRFLQTEAVTLQDVRGRDYQNAMRVWSNIPGLKSKHAPLTPKEEEYLQAQVRSRSKLDAPKVDLLVKNCLLPLREYFKYFSQNSLPLGGPSSGAPPPSGGSPAGSPTSTEEGTSESATPESGPGTSTEPSEGSAPGSPAGSPTSTEEGTSTEPSEGSAPGTSTEPSEGMAPKKKRKVGRVPLEPGEKPYKCPECGKSFSRADNLTEHQRTHTGEKPYKCPECGKSFSTSGSLVRHQRTHTGEKPYKCPECGKSFSRKDNLKNHQRTHTGEKPYKCPECGKSFSQSSSLVRHQRTHTGEKPYKCPECGKSFSRSDKLVRHQRTHTGEKPYKCPECGKSFSDSGNLRVHQRTHTGKKTSGSGPKKKRKVNGGGGSRTLVTFKDVFVDFTREEWKLLDTAQQIVYRNVMLENYKNLVSLGYQLTKPDVILRLEKGEEPWLV

SEQ ID NO: 1024 - protein, 894 aa, Synthetic construct
  REGION 1..894: note = 3xFLAG-DNMT3AL-XTEN80-SV40 NLS-ZFP-SV40 NLS-KRAB (AA sequence)
MHDQEFDPPKVYPPVPAEKRKPIRVLSLFDGIATGLLVLKDLGIQVDRYIASEVCEDSITVGMVRHQGKIMYVGDVRSVTQKHIQEWGPFDLVIGGSPCNDLSIVNPARKGLYEGTGRLFFEFYRLLHDARPKEGDDRPFFWLFENVVAMGVSDKRDISRFLESNPVMIDAKEVSAAHRARYFWGNLPGMNRPLASTVNDKLELQECLEHGRIAKFSKVRTITTRSNSIKQGKDQHFPVFMNEKEDILWCTEMERVFGFPVHYTDVSNMSRLARQRLLGRSWSVPVIRHLFAPLKEYFACVSSGNSNANSRGPSFSSGLVPLSLRGSHMGPMEIYKTVSAWKRQPVRVLSLFRNIDKVLKSLGFLESGSGSGGGTLKYVEDVTNVVRRDVEKWGPFDLVYGSTQPLGSSCDRCPGWYMFQFHRILQYALPRQESQRPFFWIFMDNLLLTEDDQETTTRFLQTEAVTLQDVRGRDYQNAMRVWSNIPGLKSKHAPLTPKEEEYLQAQVRSRSKLDAPKVDLLVKNCLLPLREYFKYFSQNSLPLGGPSSGAPPPSGGSPAGSPTSTEEGTSESATPESGPGTSTEPSEGSAPGSPAGSPTSTEEGTSTEPSEGSAPGTSTEPSEGMAPKKKRKVGRVPLEPGEKPYACPECGKSFSQSSSLVRHQRTHTGEKPYKCPECGKSFSQSGDLRRHQRTHTGEKPYKCPECGKSFSRSDERKRHQRTHTGEKPYACPECGKSFSHRTTLTNHQRTHTGEKPYKCPECGKSFSRSDHLTNHQRTHTGEKPYKCPECGKSFSTSGELVRHQRTHTGKKTSGSGPKKKRKVNGGGGSRTLVTFKDVFVDFTREEWKLLDTAQQIVYRNVMLENYKNLVSLGYQLTKPDVILRLEKGEEPWLV

SEQ ID NO: 1025 - protein, 894 aa, Synthetic construct
  REGION 1..894: note = 3xFLAG-DNMT3AL-XTEN80-SV40 NLS-ZFP-SV40 NLS-KRAB (AA sequence)
MHDQEFDPPKVYPPVPAEKRKPIRVLSLFDGIATGLLVLKDLGIQVDRYIASEVCEDSITVGMVRHQGKIMYVGDVRSVTQKHIQEWGPFDLVIGGSPCNDLSIVNPARKGLYEGTGRLFFEFYRLLHDARPKEGDDRPFFWLFENVVAMGVSDKRDISRFLESNPVMIDAKEVSAAHRARYFWGNLPGMNRPLASTVNDKLELQECLEHGRIAKFSKVRTITTRSNSIKQGKDQHFPVFMNEKEDILWCTEMERVFGFPVHYTDVSNMSRLARQRLLGRSWSVPVIRHLFAPLKEYFACVSSGNSNANSRGPSFSSGLVPLSLRGSHMGPMEIYKTVSAWKRQPVRVLSLFRNIDKVLKSLGFLESGSGSGGGTLKYVEDVTNVVRRDVEKWGPFDLVYGSTQPLGSSCDRCPGWYMFQFHRILQYALPRQESQRPFFWIFMDNLLLTEDDQETTTRFLQTEAVTLQDVRGRDYQNAMRVWSNIPGLKSKHAPLTPKEEEYLQAQVRSRSKLDAPKVDLLVKNCLLPLREYFKYFSQNSLPLGGPSSGAPPPSGGSPAGSPTSTEEGTSESATPESGPGTSTEPSEGSAPGSPAGSPTSTEEGTSTEPSEGSAPGTSTEPSEGMAPKKKRKVGRVPLEPGEKPYACPECGKSFSQSGDLRRHQRTHTGEKPYKCPECGKSFSRSDERKRHQRTHTGEKPYKCPECGKSFSHRTTLTNHQRTHTGEKPYACPECGKSFSRSDHLTNHQRTHTGEKPYKCPECGKSFSTSGELVRHQRTHTGEKPYKCPECGKSFSRSDDLVRHQRTHTGKKTSGSGPKKKRKVNGGGGSRTLVTFKDVFVDFTREEWKLLDTAQQIVYRNVMLENYKNLVSLGYQLTKPDVILRLEKGEEPWLV

SEQ ID NO: 1026 - protein, 894 aa, Synthetic construct
  REGION 1..894: note = 3xFLAG-DNMT3AL-XTEN80-SV40 NLS-ZFP-SV40 NLS-KRAB (AA sequence)
MHDQEFDPPKVYPPVPAEKRKPIRVLSLFDGIATGLLVLKDLGIQVDRYIASEVCEDSITVGMVRHQGKIMYVGDVRSVTQKHIQEWGPFDLVIGGSPCNDLSIVNPARKGLYEGTGRLFFEFYRLLHDARPKEGDDRPFFWLFENVVAMGVSDKRDISRFLESNPVMIDAKEVSAAHRARYFWGNLPGMNRPLASTVNDKLELQECLEHGRIAKFSKVRTITTRSNSIKQGKDQHFPVFMNEKEDILWCTEMERVFGFPVHYTDVSNMSRLARQRLLGRSWSVPVIRHLFAPLKEYFACVSSGNSNANSRGPSFSSGLVPLSLRGSHMGPMEIYKTVSAWKRQPVRVLSLFRNIDKVLKSLGFLESGSGSGGGTLKYVEDVTNVVRRDVEKWGPFDLVYGSTQPLGSSCDRCPGWYMFQFHRILQYALPRQESQRPFFWIFMDNLLLTEDDQETTTRFLQTEAVTLQDVRGRDYQNAMRVWSNIPGLKSKHAPLTPKEEEYLQAQVRSRSKLDAPKVDLLVKNCLLPLREYFKYFSQNSLPLGGPSSGAPPPSGGSPAGSPTSTEEGTSESATPESGPGTSTEPSEGSAPGSPAGSPTSTEEGTSTEPSEGSAPGTSTEPSEGMAPKKKRKVGRVPLEPGEKPYACPECGKSFSQRAHLERHQRTHTGEKPYKCPECGKSFSQLAHLRAHQRTHTGEKPYKCPECGKSFSDPGHLVRHQRTHTGEKPYACPECGKSFSRRSACRRHQRTHTGEKPYKCPECGKSFSRSDHLTTHQRTHTGEKPYKCPECGKSFSQSSSLVRHQRTHTGKKTSGSGPKKKRKVNGGGGSRTLVTFKDVFVDFTREEWKLLDTAQQIVYRNVMLENYKNLVSLGYQLTKPDVILRLEKGEEPWLV

SEQ ID NO: 1027 - protein, 894 aa, Synthetic construct
  REGION 1..894: note = 3xFLAG-DNMT3AL-XTEN80-SV40 NLS-ZFP-SV40 NLS-KRAB (AA sequence)
MHDQEFDPPKVYPPVPAEKRKPIRVLSLFDGIATGLLVLKDLGIQVDRYIASEVCEDSITVGMVRHQGKIMYVGDVRSVTQKHIQEWGPFDLVIGGSPCNDLSIVNPARKGLYEGTGRLFFEFYRLLHDARPKEGDDRPFFWLFENVVAMGVSDKRDISRFLESNPVMIDAKEVSAAHRARYFWGNLPGMNRPLASTVNDKLELQECLEHGRIAKFSKVRTITTRSNSIKQGKDQHFPVFMNEKEDILWCTEMERVFGFPVHYTDVSNMSRLARQRLLGRSWSVPVIRHLFAPLKEYFACVSSGNSNANSRGPSFSSGLVPLSLRGSHMGPMEIYKTVSAWKRQPVRVLSLFRNIDKVLKSLGFLESGSGSGGGTLKYVEDVTNVVRRDVEKWGPFDLVYGSTQPLGSSCDRCPGWYMFQFHRILQYALPRQESQRPFFWIFMDNLLLTEDDQETTTRFLQTEAVTLQDVRGRDYQNAMRVWSNIPGLKSKHAPLTPKEEEYLQAQVRSRSKLDAPKVDLLVKNCLLPLREYFKYFSQNSLPLGGPSSGAPPPSGGSPAGSPTSTEEGTSESATPESGPGTSTEPSEGSAPGSPAGSPTSTEEGTSTEPSEGSAPGTSTEPSEGMAPKKKRKVGRVPLEPGEKPYACPECGKSFSQSSNLVRHQRTHTGEKPYKCPECGKSFSRSDDLVRHQRTHTGEKPYKCPECGKSFSTHLDLIRHQRTHTGEKPYACPECGKSFSTSGNLTEHQRTHTGEKPYKCPECGKSFSRRSACRRHQRTHTGEKPYKCPECGKSFSRNDTLTEHQRTHTGKKTSGSGPKKKRKVNGGGGSRTLVTFKDVFVDFTREEWKLLDTAQQIVYRNVMLENYKNLVSLGYQLTKPDVILRLEKGEEPWLV

SEQ ID NO: 1028 - DNA, 18 bp, Synthetic construct
  misc_feature 1..18: note = ZFP target DNA sequence
  source 1..18: mol_type = other DNA
caagtgtttgctgacgca

SEQ ID NO: 1029 - DNA, 18 bp, Synthetic construct
  misc_feature 1..18: note = ZFP target DNA sequence
  source 1..18: mol_type = other DNA
ggctggggcttggtcatg

SEQ ID NO: 1030 - DNA, 18 bp, Synthetic construct
  misc_feature 1..18: note = ZFP target DNA sequence
  source 1..18: mol_type = other DNA
gctggggcttggtcatgg

SEQ ID NO: 1031 - DNA, 18 bp, Synthetic construct
  misc_feature 1..18: note = ZFP target DNA sequence
  source 1..18: mol_type = other DNA
ttggtcatgggccatcag

SEQ ID NO: 1032 - DNA, 18 bp, Synthetic construct
  misc_feature 1..18: note = ZFP target DNA sequence
  source 1..18: mol_type = other DNA
tgcgtggaaccttttcgg

SEQ ID NO: 1033 - DNA, 18 bp, Synthetic construct
  misc_feature 1..18: note = ZFP target DNA sequence
  source 1..18: mol_type = other DNA
gcagcaggtctggagcaa

SEQ ID NO: 1034 - DNA, 18 bp, Synthetic construct
  misc_feature 1..18: note = ZFP target DNA sequence
  source 1..18: mol_type = other DNA
cagcaggtctggagcaaa

SEQ ID NO: 1035 - DNA, 18 bp, Synthetic construct
  misc_feature 1..18: note = ZFP target DNA sequence
  source 1..18: mol_type = other DNA
agcaggtctggagcaaac

SEQ ID NO: 1036 - DNA, 18 bp, Synthetic construct
  misc_feature 1..18: note = ZFP target DNA sequence
  source 1..18: mol_type = other DNA
atcgtatccatggctgct

SEQ ID NO: 1037 - DNA, 18 bp, Synthetic construct
  misc_feature 1..18: note = ZFP target DNA sequence
  source 1..18: mol_type = other DNA
ccagtgggggttgcgtca

SEQ ID NO: 1038 - DNA, 18 bp, Synthetic construct
  misc_feature 1..18: note = ZFP target DNA sequence
  source 1..18: mol_type = other DNA
ccccagccagtgggggtt

SEQ ID NO: 1039 - DNA, 18 bp, Synthetic construct
  misc_feature 1..18: note = ZFP target DNA sequence
  source 1..18: mol_type = other DNA
gcgctgatggcccatgac

SEQ ID NO: 1040 - DNA, 18 bp, Synthetic construct
  misc_feature 1..18: note = ZFP target DNA sequence
  source 1..18: mol_type = other DNA
cacgcacgcgctgatggc

SEQ ID NO: 1041 - DNA, 18 bp, Synthetic construct
  misc_feature 1..18: note = ZFP target DNA sequence
  source 1..18: mol_type = other DNA
agaggagccgaaaaggtt

SEQ ID NO: 1042 - DNA, 18 bp, Synthetic construct
  misc_feature 1..18: note = ZFP target DNA sequence
  source 1..18: mol_type = other DNA
ggatcggcagaggagccg

SEQ ID NO: 1043 - DNA, 18 bp, Synthetic construct
  misc_feature 1..18: note = ZFP target DNA sequence
  source 1..18: mol_type = other DNA
cagtatggatcggcagag

SEQ ID NO: 1044 - DNA, 18 bp, Synthetic construct
  misc_feature 1..18: note = ZFP target DNA sequence
  source 1..18: mol_type = other DNA
gttccgcagtatggatcg

SEQ ID NO: 1045 - DNA, 18 bp, Synthetic construct
  misc_feature 1..18: note = ZFP target DNA sequence
  source 1..18: mol_type = other DNA
ggagttccgcagtatgga

SEQ ID NO: 1046 - DNA, 18 bp, Synthetic construct
  misc_feature 1..18: note = ZFP target DNA sequence
  source 1..18: mol_type = other DNA
gcaaaacaagcggctagg

SEQ ID NO: 1047 - DNA, 18 bp, Synthetic construct
  misc_feature 1..18: note = ZFP target DNA sequence
  source 1..18: mol_type = other DNA
tttgctccagacctgctg

SEQ ID NO: 1048 - DNA, 18 bp, Synthetic construct
  misc_feature 1..18: note = ZFP target DNA sequence
  source 1..18: mol_type = other DNA
gatgtatatttgcgggag

SEQ ID NO: 1049 - DNA, 18 bp, Synthetic construct
  misc_feature 1..18: note = ZFP target DNA sequence
  source 1..18: mol_type = other DNA
cagccagtgggggttgcg

SEQ ID NO: 1050 - DNA, 18 bp, Synthetic construct
  misc_feature 1..18: note = ZFP target DNA sequence
  source 1..18: mol_type = other DNA
gatggcccatgaccaagc

SEQ ID NO: 1051 - DNA, 18 bp, Synthetic construct
  misc_feature 1..18: note = ZFP target DNA sequence
  source 1..18: mol_type = other DNA
ggggtaaaggttcaggta

SEQ ID NO: 1052 - DNA, 18 bp, Synthetic construct
  misc_feature 1..18: note = ZFP target DNA sequence
  source 1..18: mol_type = other DNA
gctaggagttccgcagta

SEQ ID NO: 1053 - DNA, 18 bp, Synthetic construct
  misc_feature 1..18: note = ZFP target DNA sequence
  source 1..18: mol_type = other DNA
gcggctaggagttccgca

SEQ ID NO: 1054 - DNA, 18 bp, Synthetic construct
  misc_feature 1..18: note = ZFP target DNA sequence
  source 1..18: mol_type = other DNA
gtatggatcggcagagga

SEQ ID NO: 1055 - DNA, 18 bp, Synthetic construct
  misc_feature 1..18: note = ZFP target DNA sequence
  source 1..18: mol_type = other DNA
ccgatccatactgcggaa

SEQ ID NO: 1056 - DNA, 42 bp, Synthetic construct
  misc_feature 1..42: note = 1 bp - 42 bp
  source 1..42: mol_type = other DNA
aattccacaacctttcaccaaactctgcaagatcccagagtg

SEQ ID NO: 1057 - DNA, 448 bp, Synthetic construct
  misc_feature 1..448: note = 43 bp - 490 bp
  source 1..448: mol_type = other DNA
agaggcctgtatttccctgctggtggctccagttcaggagcagtaaaccctgttccgactactgcctctcccttatcgtcaatcttctcgaggattggggaccctgcgctgaacatggagaacatcacatcaggattcctaggaccccttctcgtgttacaggcggggtttttcttgttgacaagaatcctcacaataccgcagagtctagactcgtggtggacttctctcaattttctagggggaactaccgtgtgtcttggccaaaattcgcagtccccaacctccaatcactcaccaacctcctgtcctccaacttgtcctggttatcgctggatgtgtctgcggcgttttatcatcttcctcttcatcctgctgctatgcctcatcttcttgttggttcttctggactatcaaggtatgttgcccgtttgtcctctaattccag

SEQ ID NO: 1058 - DNA, 552 bp, Synthetic construct
  misc_feature 1..552: note = 491 bp - 1032 bp
  source 1..552: mol_type = other DNA
gatcctcaaccaccagcacgggaccatgccgaacctgcatgactactgctcaaggaacctctatgtatccctcctgttgctgtaccaaaccttcggacggaaattgcacctgtattcccatcccatcatcctgggctttcggaaaattcctatgggagtgggcctcagcccgtttctcctggctcagtttactagtgccatttgttcagtggttcgtagggctttcccccactgtttggctttcagttatatggatgatgtggtattgggggccaagtctgtacagcatcttgagtccctttttaccgctgttaccaattttcttttgtctttgggtatacatttaaaccctaacaaaacaaagagatggggttactctctgaattttatgggttatgtcattggaagttatgggtccttgccacaagaacacatcatacaaaaaatcaaagaatgttttagaaaacttcctattaacaggcctattgattggaaagtatgtcaacgaattgtgggtcttttgggttttgctgccccatttacacaatgtgg

SEQ ID NO: 1059 - DNA, 707 bp, Synthetic construct
  misc_feature 1..707: note = 1033 bp - 1749 bp
  source 1..707: mol_type = other DNA
ttatcctgcgttaatgcccttgtatgcatgtattcaatctaagcaggctttcactttctcgccaacttacaaggcctttctgtgtaaacaatacctgaacctttaccccgttgcccggcaacggccaggtctgtgccaagtgtttgctgacgcaacccccactggctggggcttggtcatgggccatcagcgcgtgcgtggaaccttttcggctcctctgccgatccatactgcggaactcctagccgcttgttttgctcgcagcaggtctggagcaaacattatcgggactgataactctgttgtcctctcccgcaaatatacatcgtatccatggctgctaggctgtgctgccaactggatcctgcgcgggacgtcctttgtttacgtcccgtcggcgctgaatcctgcggacgacccttctcggggtcgcttgggactctctcgtccccttctccgtctgccgttccgaccgaccacggggcgcacctctctttacgcggactccccgtctgtgccttctcatctgccggaccgtgtgcacttcgcttcacctctgcacgtcgcatggagaccaccgtgaacgcccaccgaatgttgcccaaggtcttacataagaggactcttggactctctgcaatgtcaacgaccgaccttgaggcatacttcaaagactgtttgtttaaagactgggaggagttggggga

SEQ ID NO: 1060 - DNA, 50 bp, Synthetic construct
  misc_feature 1..50: note = 1750 bp - 1799 bp
  source 1..50: mol_type = other DNA
ggagattagattaaaggtctttgtactaggaggctgtaggcataaattgg

SEQ ID NO: 1061 - DNA, 161 bp, Synthetic construct
  misc_feature 1..161: note = 1800 bp - 1950 bp
  source 1..161: mol_type = other DNA
tctgcgcaccagcaccatgcaactttttcacctctgcctaatcatctcttgttcatgtcctactgttcaagcctccaagctgtgccttgggtggctttggggcatggacatcgacccttataaagaatttggagctactgtggagttactctcgtttttgc

SEQ ID NO: 1062 - DNA, 992 bp, Synthetic construct
  misc_feature 1..992: note = 1951 bp -2952
  source 1..992: mol_type = other DNA
cttctgacttctttccttcagtacgagatcttctagataccgcctcagctctgtatcgggaagccttagagtctcctgagcattgttcacctcaccatactgcactcaggcaagcaattctttgctggggggaactaatgactctagctacctgggtgggtgttaatttggaagatccagcatctagagacctagtagtcagttatgtcaacactaatatgggcctaaagttcaggcaactcttgtggtttcacatttcttgtctcacttttggaagagaaaccgttatagagtatttggtgtctttcggagtgtggattcgcactcctccagcttatagaccaccaaatgcccctatcctatcaacacttccggaaactactgttgttagacgacgaggcaggtcccctagaagaagaactccctcgcctcgcagacgaaggtctcaatcgccgcgtcgcagaagatctcaatctcgggaacctcaatgttagtattccttggactcataaggtggggaactttactggtctttattcttctactgtacctgtctttaatcctcattggaaaacaccatcttttcctaatatacatttacaccaagacattatcaaaaaatgtgaacagtttgtaggcccacttacagttaatgagaaaagaagattgcaattgattatgcctgctaggttttatccaaaggttaccaaatatttaccattggataagggtattaaaccttattatccagaacatctagttaatcattacttccaaactagacactatttacacactctatggaaggcgggtatattatataagagagaaacaacacatagcgcctcattttgtgggtcaccatattcttgggaacaagatctacagcatggggcagaatctttccaccagcaatcctctgggattctttcccgaccaccagttggatccagccttcagagcaaacacagcaaatccagattgggacttca

SEQ ID NO: 1063 - DNA, 230 bp, Synthetic construct
  misc_feature 1..230: note = 2953 bp - 3182
  source 1..230: mol_type = other DNA
atcccaacaaggacacctggccagacgccaacaaggtaggagctggagcattcgggctgggtttcaccccaccgcacggaggccttttggggtggagccctcaggctcagggcatactacaaactttgccagcaaatccgcctcctgcctccaccaatcgccagacaggaaggcagcctaccccgctgtctccacctttgagaaacactcatcctcaggccatgcagtgg

SEQ ID NO: 1064 - DNA, 336 bp, Synthetic construct
  misc_feature 1..336: note = 67 bp   392 bp
  source 1..336: mol_type = other DNA
ggctccagttcaggagcagtaaaccctgttccgactactgcctctcccttatcgtcaatcttctcgaggattggggaccctgcgctgaacatggagaacatcacatcaggattcctaggaccccttctcgtgttacaggcggggtttttcttgttgacaagaatcctcacaataccgcagagtctagactcgtggtggacttctctcaattttctagggggaactaccgtgtgtcttggccaaaattcgcagtccccaacctccaatcactcaccaacctcctgtcctccaacttgtcctggttatcgctggatgtgtctgcggcgttttatcatc

SEQ ID NO: 1065 - DNA, 717 bp, Synthetic construct
  misc_feature 1..717: note = 1033 bp -1749 bp
  source 1..717: mol_type = other DNA
cacaatgtggttatcctgcgttaatgcccttgtatgcatgtattcaatctaagcaggctttcactttctcgccaacttacaaggcctttctgtgtaaacaatacctgaacctttaccccgttgcccggcaacggccaggtctgtgccaagtgtttgctgacgcaacccccactggctggggcttggtcatgggccatcagcgcgtgcgtggaaccttttcggctcctctgccgatccatactgcggaactcctagccgcttgttttgctcgcagcaggtctggagcaaacattatcgggactgataactctgttgtcctctcccgcaaatatacatcgtatccatggctgctaggctgtgctgccaactggatcctgcgcgggacgtcctttgtttacgtcccgtcggcgctgaatcctgcggacgacccttctcggggtcgcttgggactctctcgtccccttctccgtctgccgttccgaccgaccacggggcgcacctctctttacgcggactccccgtctgtgccttctcatctgccggaccgtgtgcacttcgcttcacctctgcacgtcgcatggagaccaccgtgaacgcccaccgaatgttgcccaaggtcttacataagaggactcttggactctctgcaatgtcaacgaccgaccttgaggcatacttcaaagactgtttgtttaaagactgggaggagttggggga

SEQ ID NO: 1066 - DNA, 286 bp, Synthetic construct
  misc_feature 1..286: note = 2215 bp   2490
  source 1..286: mol_type = other DNA
gtggtttcacatttcttgtctcacttttggaagagaaaccgttatagagtatttggtgtctttcggagtgtggattcgcactcctccagcttatagaccaccaaatgcccctatcctatcaacacttccggaaactactgttgttagacgacgaggcaggtcccctagaagaagaactccctcgcctcgcagacgaaggtctcaatcgccgcgtcgcagaagatctcaatctcgggaacctcaatgttagtattccttggactcataaggtggggaactttactgg

SEQ ID NO: 1067 - DNA, 421 bp, Synthetic construct
  misc_feature 1..421: note = 1060-1480 bp
  source 1..421: mol_type = other DNA
ccttgtatgcatgtattcaatctaagcaggctttcactttctcgccaacttacaaggcctttctgtgtaaacaatacctgaacctttaccccgttgcccggcaacggccaggtctgtgccaagtgtttgctgacgcaacccccactggctggggcttggtcatgggccatcagcgcgtgcgtggaaccttttcggctcctctgccgatccatactgcggaactcctagccgcttgttttgctcgcagcaggtctggagcaaacattatcgggactgataactctgttgtcctctcccgcaaatatacatcgtatccatggctgctaggctgtgctgccaactggatcctgcgcgggacgtcctttgtttacgtcccgtcggcgctgaatcctgcggacgacccttctcggggtcgcttggg

SEQ ID NO: 1068 - DNA, 125 bp, Synthetic construct
  misc_feature 1..125: note = 1250-1374 bp
  source 1..125: mol_type = other DNA
ttcggctcctctgccgatccatactgcggaactcctagccgcttgttttgctcgcagcaggtctggagcaaacattatcgggactgataactctgttgtcctctcccgcaaatatacatcgtatc

SEQ ID NO: 1069 - DNA, 48 bp, Synthetic construct
  misc_feature 1..48: note = 1255-1302 bp
  source 1..48: mol_type = other DNA
ctcctctgccgatccatactgcggaactcctagccgcttgttttgctc

SEQ ID NO: 1070 - DNA, 41 bp, Synthetic construct
  misc_feature 1..41: note = 1260-1300 bp
  source 1..41: mol_type = other DNA
ctgccgatccatactgcggaactcctagccgcttgttttgc

SEQ ID NO: 1071 - DNA, 3182 bp, synthetic construct
  source 1..3182: mol_type = other DNA
  misc_feature 1..3182: note = Hepatitis B Virus genome-2
ttccacaacctttcaccaaactctgcaagatcccagagtgagaggcctgtatttccctgctggtggctccagttcaggagcagtaaaccctgttccgactactgcctctcccttatcgtcaatcttctcgaggattggggaccctgcgctgaacatggagaacatcacatcaggattcctaggaccccttctcgtgttacaggcggggtttttcttgttgacaagaatcctcacaataccgcagagtctagactcgtggtggacttctctcaattttctagggggaactaccgtgtgtcttggccaaaattcgcagtccccaacctccaatcactcaccaacctcctgtcctccaacttgtcctggttatcgctggatgtgtctgcggcgttttatcatcttcctcttcatcctgctgctatgcctcatcttcttgttggttcttctggactatcaaggtatgttgcccgtttgtcctctaattccaggatcctcaaccaccagcacgggaccatgccgaacctgcatgactactgctcaaggaacctctatgtatccctcctgttgctgtaccaaaccttcggacggaaattgcacctgtattcccatcccatcatcctgggctttcggaaaattcctatgggagtgggcctcagcccgtttctcctggctcagtttactagtgccatttgttcagtggttcgtagggctttcccccactgtttggctttcagttatatggatgatgtggtattgggggccaagtctgtacagcatcttgagtccctttttaccgctgttaccaattttcttttgtctttgggtatacatttaaaccctaacaaaacaaagagatggggttactctctgaattttatgggttatgtcattggaagttatgggtccttgccacaagaacacatcatacaaaaaatcaaagaatgttttagaaaacttcctattaacaggcctattgattggaaagtatgtcaacgaattgtgggtcttttgggttttgctgccccatttacacaatgtggttatcctgcgttaatgcccttgtatgcatgtattcaatctaagcaggctttcactttctcgccaacttacaaggcctttctgtgtaaacaatacctgaacctttaccccgttgcccggcaacggccaggtctgtgccaagtgtttgctgacgcaacccccactggctggggcttggtcatgggccatcagcgcgtgcgtggaaccttttcggctcctctgccgatccatactgcggaactcctagccgcttgttttgctcgcagcaggtctggagcaaacattatcgggactgataactctgttgtcctctcccgcaaatatacatcgtatccatggctgctaggctgtgctgccaactggatcctgcgcgggacgtcctttgtttacgtcccgtcggcgctgaatcctgcggacgacccttctcggggtcgcttgggactctctcgtccccttctccgtctgccgttccgaccgaccacggggcgcacctctctttacgcggactccccgtctgtgccttctcatctgccggaccgtgtgcacttcgcttcacctctgcacgtcgcatggagaccaccgtgaacgcccaccgaatgttgcccaaggtcttacataagaggactcttggactctctgcaatgtcaacgaccgaccttgaggcatacttcaaagactgtttgtttaaagactgggaggagttgggggaggagattagattaaaggtctttgtactaggaggctgtaggcataaattggtctgcgcaccagcaccatgcaactttttcacctctgcctaatcatctcttgttcatgtcctactgttcaagcctccaagctgtgccttgggtggctttggggcatggacatcgacccttataaagaatttggagctactgtggagttactctcgtttttgccttctgacttctttccttcagtacgagatcttctagataccgcctcagctctgtatcgggaagccttagagtctcctgagcattgttcacctcaccatactgcactcaggcaagcaattctttgctggggggaactaatgactctagctacctgggtgggtgttaatttggaagatccagcatctagagacctagtagtcagttatgtcaacactaatatgggcctaaagttcaggcaactcttgtggtttcacatttcttgtctcacttttggaagagaaaccgttatagagtatttggtgtctttcggagtgtggattcgcactcctccagcttatagaccaccaaatgcccctatcctatcaacacttccggaaactactgttgttagacgacgaggcaggtcccctagaagaagaactccctcgcctcgcagacgaaggtctcaatcgccgcgtcgcagaagatctcaatctcgggaacctcaatgttagtattccttggactcataaggtggggaactttactggtctttattcttctactgtacctgtctttaatcctcattggaaaacaccatcttttcctaatatacatttacaccaagacattatcaaaaaatgtgaacagtttgtaggcccacttacagttaatgagaaaagaagattgcaattgattatgcctgctaggttttatccaaaggttaccaaatatttaccattggataagggtattaaaccttattatccagaacatctagttaatcattacttccaaactagacactatttacacactctatggaaggcgggtatattatataagagagaaacaacacatagcgcctcattttgtgggtcaccatattcttgggaacaagatctacagcatggggcagaatctttccaccagcaatcctctgggattctttcccgaccaccagttggatccagccttcagagcaaacacagcaaatccagattgggacttcaatcccaacaaggacacctggccagacgccaacaaggtaggagctggagcattcgggctgggtttcaccccaccgcacggaggccttttggggtggagccctcaggctcagggcatactacaaactttgccagcaaatccgcctcctgcctccaccaatcgccagacaggaaggcagcctaccccgctgtctccacctttgagaaacactcatcctcaggccatgcagtggaa
